(19) United States
(12) Patent Application Publication
(10) Pub. No.: US 2025/0163445 A1
(43) Pub. Date: May 22, 2025

(54) DOMESTICATION OF A LEGUME PLANT

(71) Applicant: BETTERSEEDS LTD, Givat Chen (IL)

(72) Inventors: Ido MARGALIT, Gan Yavne (IL); Tal SHERMAN, Rehovot (IL); Shira COREM, Sdei Hemed (IL)

(21) Appl. No.: 19/025,222

(22) Filed: Jan. 16, 2025

Related U.S. Application Data
(62) Division of application No. 18/279,761, filed on Sep. 1, 2023.
(60) Provisional application No. 63/155,340, filed on Mar. 2, 2021.
(60) Provisional application No. 63/252,182, filed on Oct. 5, 2021.

(51) Int. Cl. C12N 15/82; A01H 6/54; C12N 9/22

(52) U.S. Cl. CPC C12N 15/8262; A01H 6/54; C12N 9/22; C12N 15/8205; C12N 15/8213; C12N 2310/20

(57) ABSTRACT

The present disclosure relates to conferring desirable agronomic traits in Legume plants. More particularly, the current invention pertains to producing Legume plants with improved traits by manipulating genes controlling plant architecture.

### FIELD OF THE INVENTION

[0001] The present disclosure relates to conferring desirable agronomic traits in Legumes plants. More particularly, the current invention pertains to producing Legumes plants with improved traits by manipulating genes controlling plant architecture.

### BACKGROUND OF THE INVENTION

[0002] One of the most important determinants of crop productivity is plant architecture. For many crops, artificial selection for modified shoot architectures provided critical steps towards improving yield, followed by improvements enabling large-scale field production. A prominent example is tomato, in which the discovery of a mutation in the antiflorigen-encoding self-pruning gene (sp), led to determinate plants that provided a burst of flowering and synchronized fruit ripening, permitting mechanical harvesting.

[0003] The publication of Li et al (2018), nature biotechnology, “Domestication of wild tomato is accelerated by genome editing”, teach the assembly of a set of six gRNAs to edit four genes (SlCLV3, SlWUS, SP and SP5G), into one construct. The construct was transformed into four S. pimpinellifolium accessions, all of which are resistant to bacterial spot disease, and two of which are salt tolerant. Small indels and large insertions have been identified in the targeted regulatory regions of SlCLV3 and SlWUS in T0 and their T1 mutant plants. It was reported in this publication that although SP and SP5G are crucial for improving the harvest index, the limited allelic variation has hampered efforts to optimize this trait. It was further reported that locule number was not increased in T0 and T1 plants with large insertions and inversions in the targeted SlCLV3 promoter region. One explanation for this finding is that the targeted region of the S1CLV3 promoter may not be essential for regulating SlCLV3 transcription. Alternatively, it was suggested that disruption of regions (gRNA-5) flanking the CArG element downstream of SlWUS may have decreased its transcription and counteracted the effects of mutation of SlCLV3, owing to a negative feedback loop of CLV3-WUS in controlling stem cell proliferation.

[0004] The publication of Zsögön et al (2018), nature biotechnology, “De novo domestication of wild tomato using genome editing”, discloses a devised CRISPR-Cas9 genome engineering strategy to combine agronomically desirable traits with useful traits presented in Solanum pimpinellifolium wild lines. The four edited genes were SELF-PRUNING (SP), OVATE (O), FRUIT WEIGHT 2.2 (FW2.2) and LYCOPENE BETA CYCLASE (CycB).

[0005] Lemmon et al (2018), Nature Plants, “Rapid improvement of domestication traits in an orphan crop by genome editing”, describes the usage of CRISPR-Cas9 to mutate orthologues of tomato domestication and improvement genes that control plant architecture, flower production and fruit size in the orphan Solanaceae crop ‘groundcherry’ (Physalis pruinosa).

[0006] In open field crops, such as Legumes and Cocoa, it is essential for enabling sustainable agriculture, to be able to harvest the plants mechanically, instead of manual labor. Furthermore, resistance to plant diseases, such as fungi and viruses are also essential in order to maintain profitability and sustainability for open field crops.

[0007] Certain open field crops, including soybean, have been domesticated through conventional breeding to express determinate characteristics that enable easier harvesting via machinery.

[0008] Certain legumes, such as peanuts and/or cowpea, due to lack of genetic diversity or investment in breeding, do not exhibit this trait.

[0009] In view of the above, there is still a long felt and unmet need to manipulate Legume plant architecture in a rapid and efficient way to increase yield and reduce production costs.

### SUMMARY OF THE INVENTION

[0010] It is one object of the present invention to disclose a modified Legume plant exhibiting at least one improved domestication trait as compared to a corresponding control Legume plant, wherein said modified plant comprises a mutated SELF PRUNING (SP) Peanut (Arachis hypogaea) gene.

[0011] It is another object of the present invention to disclose the modified Legume plant as defined in any of the above, wherein said Peanut (Arachis hypogaea) SP gene is selected from AhSP1-AhSP9 comprising a nucleic acid sequence with at least 75% sequence identity to a sequence selected from SEQ ID NO:1025, SEQ ID NO:1098, SEQ ID NO:1180, SEQ ID NO:1290, SEQ ID NO:1409, SEQ ID NO:1529, SEQ ID NO:1640, SEQ ID NO:1749 and SEQ ID NO:1928, respectively, or a functional variant thereof and any combination thereof.

[0012] It is another object of the present invention to disclose the modified Legume plant as defined in any of the above, wherein said mutation is introduced using mutagenesis, small interfering RNA (siRNA), microRNA (miRNA), artificial miRNA (amiRNA), DNA introgression, endonucleases or any combination thereof.

[0013] It is another object of the present invention to disclose the modified Legume plant as defined in any of the above, wherein said mutation is introduced using targeted genome modification.

[0014] It is another object of the present invention to disclose the modified Legume plant as defined in any of the above, wherein said mutation is introduced using CRISPR (Clustered Regularly Interspaced Short Palindromic Repeats) and CRISPR-associated (Cas) gene (CRISPR/Cas), Transcription activator-like effector nuclease (TALEN), Zinc Finger Nuclease (ZFN), meganuclease or any combination thereof.

[0015] It is another object of the present invention to disclose the modified Legume plant as defined in any of the above, wherein said Cas gene is selected from the group consisting of Cas9, Cas12, Cas13, Cas14, CasX, CasY, Csn1, Cpf1 and any combination thereof.

[0016] It is another object of the present invention to disclose the modified Legume plant as defined in any of the above, wherein the mutated SP gene is a CRISPR/Cas9-induced heritable mutated allele.

[0017] It is another object of the present invention to disclose the modified Legume plant as defined in any of the above, wherein said mutation is a missense mutation, nonsense mutation, insertion, deletion, indel, substitution or duplication.

[0018] It is another object of the present invention to disclose the modified Legume plant as defined in any of the above, wherein the insertion or the deletion produces a gene comprising a frameshift.

[0019] It is another object of the present invention to disclose the modified Legume plant as defined in any of the above, wherein said plant is homozygous for said at least one mutated SP gene.

[0020] It is another object of the present invention to disclose the modified Legume plant as defined in any of the above, wherein said mutation is in the coding region of said gene, a mutation in the regulatory region of said gene, or an epigenetic factor.

[0021] It is another object of the present invention to disclose the modified Legume plant as defined in any of the above, wherein said mutation is a silencing mutation, a knockdown mutation, a knockout mutation, a loss of function mutation or any combination thereof.

[0022] It is another object of the present invention to disclose the modified Legume plant as defined in any of the above, wherein said mutation is generated in planta.

[0023] It is another object of the present invention to disclose the modified Legume plant as defined in any of the above, wherein said mutation is generated in planta via introduction of a construct comprising (a) Cas DNA and gRNA sequence selected from the group consisting of SEQ ID NO:1027-1097, SEQ ID NO:1100-1179, SEQ ID NO:1182-1289, SEQ ID NO:1292-1408, SEQ ID NO:1411-1528, SEQ ID NO:1531-1639, SEQ ID NO:1642-1748, SEQ ID NO:1751-1927 and SEQ ID NO:1930-2051, for said at least one Peanut SP gene, and any combination thereof, or (b) a ribonucleoprotein (RNP) complex comprising Cas protein and gRNA sequence selected from the group consisting of SEQ ID NO:1027-1097, SEQ ID NO:1100-1179, SEQ ID NO:1182-1289, SEQ ID NO:1292-1408, SEQ ID NO:1411-1528, SEQ ID NO:1531-1639, SEQ ID NO:1642-1748, SEQ ID NO:1751-1927 and SEQ ID NO:1930-2051 for said at least one Peanut SP gene, and any combination thereof.

[0024] It is another object of the present invention to disclose the modified Legume plant as defined in any of the above, wherein said mutation in said at least one Peanut SP gene is generated in planta via introduction of a construct comprising (a) Cas DNA and gRNA sequence selected from the group consisting of SEQ ID NO:1027-1097, SEQ ID NO:1100-1179, SEQ ID NO:1182-1289, SEQ ID NO:1292-1408, SEQ ID NO:1411-1528, SEQ ID NO:1531-1639, SEQ ID NO:1642-1748, SEQ ID NO:1751-1927 and SEQ ID NO:1930-2051 for Peanut SEQ ID NO:1025, SEQ ID NO:1098, SEQ ID NO:1180, SEQ ID NO:1290, SEQ ID NO:1409, SEQ ID NO:1529, SEQ ID NO:1640, SEQ ID NO:1749 and SEQ ID NO:1928, respectively, and any combination thereof, or (b) a ribonucleoprotein (RNP) complex comprising Cas protein and gRNA sequence selected from the group consisting of SEQ ID NO:1027-1097, SEQ ID NO:1100-1179, SEQ ID NO:1182-1289, SEQ ID NO:1292-1408, SEQ ID NO:1411-1528, SEQ ID NO:1531-1639, SEQ ID NO:1642-1748, SEQ ID NO:1751-1927 and SEQ ID NO:1930-2051 for Peanut SEQ ID NO:1025, SEQ ID NO:1098, SEQ ID NO:1180, SEQ ID NO:1290, SEQ ID NO:1409, SEQ ID NO:1529, SEQ ID NO:1640, SEQ ID NO:1749 and SEQ ID NO:1928, respectively, and any combination thereof.

[0025] It is another object of the present invention to disclose the modified Legume plant as defined in any of the above, wherein said gRNA sequence comprises a 3′ NGG Protospacer Adjacent Motif (PAM).

[0026] It is another object of the present invention to disclose the modified Legume plant as defined in any of the above, wherein said construct is introduced into the plant cells via Agrobacterium infiltration, virus-based plasmids for delivery of genome editing molecules, or mechanical insertion such as polyethylene glycol (PEG) mediated DNA transformation, electroporation or gene gun biolistics.

[0027] It is another object of the present invention to disclose the modified Legume plant as defined in any of the above, wherein said mutation confers reduced expression of said at least one SP gene.

[0028] It is another object of the present invention to disclose the modified Legume plant as defined in any of the above, wherein said modified plant has decreased expression levels of said SP gene.

[0029] It is another object of the present invention to disclose the modified Legume plant as defined in any of the above, wherein the sequence of said expressed SP gene is selected from the group consisting of: at least 75% identity to any one of Peanut polypeptide SEQ ID NO:1026, SEQ ID NO:1099, SEQ ID NO:1181, SEQ ID NO:1291, SEQ ID NO:1410, SEQ ID NO:1530, SEQ ID NO:1641, SEQ ID NO:1750 and SEQ ID NO:1929, or a functional variant thereof.

[0030] It is another object of the present invention to disclose the modified Legume plant as defined in any of the above, wherein said SP gene encodes a polypeptide sequence selected from the group consisting of: at least 75% identity to any one of Peanut polypeptide SEQ ID NO:1026, SEQ ID NO:1099, SEQ ID NO:1181, SEQ ID NO:1291, SEQ ID NO:1410, SEQ ID NO:1530, SEQ ID NO:1641, SEQ ID NO:1750 and SEQ ID NO:1929, or a functional variant thereof.

[0031] It is another object of the present invention to disclose the modified Legume plant as defined in any of the above, wherein said modified plant is semi-determinant.

[0032] It is another object of the present invention to disclose the modified Legume plant as defined in any of the above, wherein said modified plant has determinant growth habit.

[0033] It is another object of the present invention to disclose the modified Legume plant as defined in any of the above, wherein said modified plant flowers earlier than a corresponding control Legume plant lacking said mutated SP gene.

[0034] It is another object of the present invention to disclose the modified Legume plant as defined in any of the above, wherein said modified plant exhibits improved earliness as compared to a corresponding control Legume plant lacking said mutated SP gene.

[0035] It is another object of the present invention to disclose the modified Legume plant as defined in any of the above, wherein said modified plant exhibits suppressed and/or similar sympodial shoot termination as compared to a corresponding control Legume plant lacking said mutated SP gene.

[0036] It is another object of the present invention to disclose the modified Legume plant as defined in any of the above, wherein said domestication trait is selected from the group consisting of reduced flowering time, earliness, synchronous flowering, reduced day-length sensitivity, determinant or semi-determinant architecture, early termination of sympodial cycling, earlier axillary shoot flowering, compact growth habit, reduced height, reduced number of sympodial units, adaptation to mechanical harvest, higher harvest index and any combination thereof.

[0037] It is another object of the present invention to disclose a modified Legume plant, plant part, plant tissue or plant cell as defined in any of the above, wherein said plant does not comprise a transgene.

[0038] It is another object of the present invention to disclose a plant part, plant cell, plant pod or plant seed of a modified Legume plant as defined in any of the above.

[0039] It is another object of the present invention to disclose a tissue culture of regenerable cells, protoplasts or callus obtained from the modified Legume plant as defined in any of the above.

[0040] It is another object of the present invention to disclose a method for producing a modified Legume plant exhibiting at least one improved domestication trait compared with a corresponding control Legume, said method comprises steps of genetically modifying at least one Legume SELF PRUNING (SP) gene selected from Peanut (Arachis hypogaea) SP gene, the resultant mutated SP gene has reduced expression level.

[0041] It is another object of the present invention to disclose the method as defined in any of the above, wherein said method comprises steps of genetically modifying the at least one Legume SP gene using targeted genome editing introducing a loss of function mutation in the at least one Peanut (Arachis hypogaea) SP gene.

[0042] It is another object of the present invention to disclose the method as defined in any of the above, wherein said Peanut (Arachis hypogaea) SP gene is selected from AhSP1-AhSP9 comprising a nucleic acid sequence with at least 75% sequence identity to a sequence selected from SEQ ID NO:1025, SEQ ID NO:1098, SEQ ID NO:1180, SEQ ID NO:1290, SEQ ID NO:1409, SEQ

[0043] ID NO:1529, SEQ ID NO:1640, SEQ ID NO:1749 and SEQ ID NO:1928, or a functional variant thereof and any combination thereof.

[0044] It is another object of the present invention to disclose the method as defined in any of the above, wherein said method comprises steps of:
[0045] a. identifying at least one Legume SP gene in a predetermined Legume plant;
[0046] b. synthetizing at least one guide RNA (gRNA) comprising a nucleotide sequence complementary to said at least one identified Legume SP gene;
[0047] c. transforming the predetermined Legume plant cells with a construct comprising (a) Cas nucleotide sequence operably linked to said at least one gRNA, or (b) a ribonucleoprotein (RNP) complex comprising Cas protein and said at least one gRNA;
[0048] d. screening the genome of said transformed predetermined Legume plant cells for induced targeted loss of function mutation in said at least one Legume SP gene;
[0049] e. regenerating Legume plants carrying said loss of function mutation in at least one of said Legume SP gene; and
[0050] f. screening said regenerated plants for a Legume plant with improved domestication trait.

[0051] It is another object of the present invention to disclose the method as defined in any of the above, wherein said step of screening the genome of said transformed plant cells for induced targeted loss of function mutation further comprises steps of obtaining a nucleic acid sample of said transformed plant and performing a nucleic acid amplification and optionally restriction enzyme digestion to detect a mutation in said at least one of said Legume SP gene.

[0052] It is another object of the present invention to disclose the method as defined in any of the above, wherein said SP gene is selected from the group consisting of Peanut SP gene comprising a sequence having at least 75% identity to a sequence selected from SEQ ID NO:1025, SEQ ID NO:1098, SEQ ID NO:1180, SEQ ID NO:1290, SEQ ID NO:1409, SEQ ID NO:1529, SEQ ID NO:1640, SEQ ID NO:1749 and SEQ ID NO:1928, or a functional variant thereof and any combination thereof.

[0053] It is another object of the present invention to disclose the method as defined in any of the above, wherein said mutation is introduced using mutagenesis, small interfering RNA (siRNA), microRNA (miRNA), artificial miRNA (amiRNA), DNA introgression, endonucleases or any combination thereof.

[0054] It is another object of the present invention to disclose the method as defined in any of the above, wherein said mutation is introduced using targeted genome modification.

[0055] It is another object of the present invention to disclose the method as defined in any of the above, wherein said mutation is introduced using CRISPR (Clustered Regularly

[0056] Interspaced Short Palindromic Repeats) and CRISPR-associated (Cas) gene (CRISPR/Cas), Transcription activator-like effector nuclease (TALEN), Zinc Finger Nuclease (ZFN), meganuclease or any combination thereof.

[0057] It is another object of the present invention to disclose the method as defined in any of the above, wherein said Cas gene is selected from the group consisting of Cas9, Cas12, Cas13, Cas14, CasX, CasY, Csn1, Cpf1 and any combination thereof.

[0058] It is another object of the present invention to disclose the method as defined in any of the above, wherein the mutated SP gene is a CRISPR/Cas9-induced heritable mutated allele.

[0059] It is another object of the present invention to disclose the method as defined in any of the above, wherein said mutation is a missense mutation, nonsense mutation, insertion, deletion, indel, substitution or duplication.

[0060] It is another object of the present invention to disclose the method as defined in any of the above, wherein the insertion or the deletion produces a gene comprising a frameshift.

[0061] It is another object of the present invention to disclose the method as defined in any of the above, wherein said plant is homozygous for said at least one Legume SP gene.

[0062] It is another object of the present invention to disclose the method as defined in any of the above, wherein said mutation is in the coding region of said gene, a mutation in the regulatory region of said gene, or an epigenetic factor.

[0063] It is another object of the present invention to disclose the method as defined in any of the above, wherein said mutation is a silencing mutation, a knockdown mutation, a knockout mutation, a loss of function mutation or any combination thereof.

[0064] It is another object of the present invention to disclose the method as defined in any of the above, wherein said mutation is generated in planta.

[0065] It is another object of the present invention to disclose the method as defined in any of the above, wherein said mutation is generated in planta via introduction of a construct comprising (a) Cas DNA and gRNA sequence selected from the group consisting of SEQ ID NO:1027-1097, SEQ ID NO:1100-1179, SEQ ID NO:1182-1289, SEQ ID NO:1292-1408, SEQ ID NO:1411-1528, SEQ ID NO:1531-1639, SEQ ID NO:1642-1748, SEQ ID NO:1751-1927 and SEQ ID NO:1930-2051, for said at least one Peanut SP gene, and any combination thereof, or (b) a ribonucleoprotein (RNP) complex comprising Cas protein and gRNA sequence selected from the group consisting of SEQ ID NO:1027-1097, SEQ ID NO:1100-1179, SEQ ID NO:1182-1289, SEQ ID NO:1292-1408, SEQ ID NO:1411-1528, SEQ ID NO:1531-1639, SEQ ID NO:1642-1748, SEQ ID NO:1751-1927 and SEQ ID NO:1930-2051, for said at least one Peanut SP gene, and any combination thereof.

[0066] It is another object of the present invention to disclose the method as defined in any of the above, wherein said mutation in said Peanut SP genes is generated in planta via introduction of a construct comprising (a) Cas DNA and gRNA sequence selected from the group consisting of SEQ ID NO:1027-1097, SEQ ID NO:1100-1179, SEQ ID NO:1182-1289, SEQ ID NO:1292-1408, SEQ ID NO:1411-1528, SEQ ID NO:1531-1639, SEQ ID NO:1642-1748, SEQ ID NO:1751-1927 and SEQ ID NO:1930-2051 for Peanut SEQ ID NO:1025, SEQ ID NO:1098, SEQ ID NO:1180, SEQ ID NO:1290, SEQ ID NO:1409, SEQ ID NO:1529, SEQ ID NO:1640, SEQ ID NO:1749 and SEQ ID NO:1928, respectively, or (b) a ribonucleoprotein (RNP) complex comprising Cas protein and gRNA sequence selected from the group consisting of SEQ ID NO:1027-1097, SEQ ID NO:1100-1179, SEQ ID NO:1182-1289, SEQ ID NO:1292-1408, SEQ ID NO:1411-1528, SEQ ID NO:1531-1639, SEQ ID NO:1642-1748, SEQ ID NO:1751-1927 and SEQ ID NO:1930-2051 for Peanut SEQ ID NO:1025, SEQ ID NO:1098, SEQ ID NO:1180, SEQ ID NO:1290, SEQ ID NO:1409, SEQ ID NO:1529, SEQ ID NO:1640, SEQ ID NO:1749 and SEQ ID NO:1928, respectively.

[0067] It is another object of the present invention to disclose the method as defined in any of the above, wherein said gRNA sequence comprises a 3′ NGG Protospacer Adjacent Motif (PAM).

[0068] It is another object of the present invention to disclose the method as defined in any of the above, wherein said construct is introduced into the plant p cells via Agrobacterium infiltration, virus based plasmids for delivery of the genome editing molecules or mechanical insertion such as polyethylene glycol (PEG) mediated DNA transformation, electroporation or gene gun biolistics.

[0069] It is another object of the present invention to disclose the method as defined in any of the above, wherein said modified plant has decreased expression levels of at least one of said Legume SELF PRUNING (SP) gene.

[0070] It is another object of the present invention to disclose the method as defined in any of the above, wherein said mutation confers reduced expression of said at least one SP gene.

[0071] It is another object of the present invention to disclose the method as defined in any of the above, wherein the sequence of said expressed Legume SELF PRUNING (SP) gene is selected from the group consisting of: at least 75% identity to any one of Peanut polypeptide SEQ ID NO:1026, SEQ ID NO:1099, SEQ ID NO:1181, SEQ ID NO:1291, SEQ ID NO:1410, SEQ ID NO:1530, SEQ ID NO:1641, SEQ ID NO:1750 and SEQ ID NO:1929, or a functional variant thereof.

[0072] It is another object of the present invention to disclose the method as defined in any of the above, wherein the Legume SELF PRUNING (SP) gene encodes a polypeptide sequence selected from the group consisting of: at least 75% identity to any one of Peanut polypeptide SEQ ID NO:1026, SEQ ID NO:1099, SEQ ID NO:1181, SEQ ID NO:1291, SEQ ID NO:1410, SEQ ID NO:1530, SEQ ID NO:1641, SEQ ID NO:1750 and SEQ ID NO:1929, or a functional variant thereof.

[0073] It is another object of the present invention to disclose the method as defined in any of the above, wherein said modified plant is semi-determinant.

[0074] It is another object of the present invention to disclose the method as defined in any of the above, wherein said modified plant has determinant growth habit.

[0075] It is another object of the present invention to disclose the method as defined in any of the above, wherein said modified plant flowers earlier than a corresponding control Legume plant lacking said mutated SP gene.

[0076] It is another object of the present invention to disclose the method as defined in any of the above, wherein said modified plant exhibits improved earliness as compared to a corresponding control Legume plant lacking said mutated SP gene.

[0077] It is another object of the present invention to disclose the method as defined in any of the above, wherein said modified plant exhibits suppressed sympodial shoot termination as compared to a corresponding control Legume plant lacking said mutated SP gene.

[0078] It is another object of the present invention to disclose the method as defined in any of the above, wherein said modified plant exhibits similar sympodial shoot termination as compared to a corresponding control Legume plant lacking said mutated SP gene.

[0079] It is another object of the present invention to disclose the method as defined in any of the above, wherein said modified plant exhibits suppressed or reduced day-length sensitivity as compared to a corresponding control Legume plant lacking said mutated SP gene.

[0080] It is another object of the present invention to disclose a modified Legume plant, plant part or plant cell produced by the method as defined in any of the above, wherein said modified plant does not comprise a transgene.

[0081] It is another object of the present invention to disclose a plant part, plant cell, plant pod or plant seed of a modified Legume plant produced by the method as defined in any of the above.

[0082] It is another object of the present invention to disclose a tissue culture of regenerable cells, protoplasts or callus obtained from the modified Legume plant produced by the method as defined in any of the above.

[0083] It is another object of the present invention to disclose the method as defined in any of the above, wherein said at least one domestication trait is selected from the group consisting of reduced flowering time, earliness, synchronous flowering, reduced day-length sensitivity, determinant or semi-determinant architecture, early termination of sympodial cycling, earlier axillary shoot flowering, compact growth habit, reduced height, reduced number of sympodial units, adaptation to mechanical harvest, higher harvest index and any combination thereof.

[0084] It is another object of the present invention to disclose an isolated polynucleotide sequence comprising at least 75% identity to a Legume SELF PRUNING (SP) sequence selected from the group consisting of SEQ ID NO:1, SEQ ID NO:113, SEQ ID NO:239, SEQ ID NO:340, SEQ ID NO:464, SEQ ID NO:616, SEQ ID NO:796, SEQ ID NO:1025, SEQ ID NO:1098, SEQ ID NO:1180, SEQ ID NO:1290, SEQ ID NO:1409, SEQ ID NO:1529, SEQ ID NO:1640, SEQ ID NO:1749 and SEQ ID NO:1928.

[0085] It is another object of the present invention to disclose an isolated polypeptide sequence comprising at least 75% identity to a Legume SELF PRUNING (SP) sequence selected from the group consisting of SEQ ID NO:2, SEQ ID NO:114, SEQ ID NO:240, SEQ ID NO:341, SEQ ID NO:465, SEQ ID NO:617, SEQ ID NO:797, SEQ ID NO:1026, SEQ ID NO:1099, SEQ ID NO:1181, SEQ ID NO:1291, SEQ ID NO:1410, SEQ ID NO:1530, SEQ ID NO:1641, SEQ ID NO:1750 and SEQ ID NO:1929.

[0086] It is another object of the present invention to disclose an isolated nucleotide sequence comprising least 75% sequence identity to a Legume SELF PRUNING (SP)-targeted gRNA sequence selected from the group consisting of SEQ ID NO:3-112, SEQ ID NO:115-238, SEQ ID NO:241-339, SEQ ID NO:342-463, SEQ ID NO:466-615, SEQ ID NO:618-795, SEQ ID NO:798-1024, SEQ ID NO:1027-1097, SEQ ID NO:1100-1179, SEQ ID NO:1182-1289, SEQ ID NO:1292-1408, SEQ ID NO:1411-1528, SEQ ID NO:1531-1639, SEQ ID NO:1642-1748, SEQ ID NO:1751-1927 and SEQ ID NO:1930-2051.

[0087] It is another object of the present invention to disclose harvestable parts of a modified Legume plant as defined in any of the above, wherein said harvestable parts are preferably shoot biomass and/or seeds.

[0088] It is another object of the present invention to disclose products derived from a modified comprising at least 75% sequence identity to plant as defined in any of the above, and/or from harvestable parts of a modified Legume plant as defined in any of the above.

[0089] It is another object of the present invention to disclose use of a nucleic acid encoding a polypeptide comprising at least 75% sequence identity to the sequence as defined in SEQ ID NO:2, SEQ ID NO:114, SEQ ID NO:240, SEQ ID NO:341, SEQ ID NO:465, SEQ ID NO:617, SEQ ID NO:797, SEQ ID NO:1026, SEQ ID NO:1099, SEQ ID NO:1181, SEQ ID NO:1291, SEQ ID NO:1410, SEQ ID NO:1530, SEQ ID NO:1641, SEQ ID NO:1750 and SEQ ID NO:1929, in enhancing yield and/or domestication, in Legume plants, relative to control plants.

### DETAILED DESCRIPTION OF THE PREFERRED EMBODIMENTS

[0090] In the following detailed description of the preferred embodiments, reference is made to the accompanying drawings that form a part hereof, and in which are shown by way of illustration specific embodiments in which the invention may be practiced. It is understood that other embodiments may be utilized and structural changes may be made without departing from the scope of the present invention. The present invention may be practiced according to the claims without some or all of these specific details. For the purpose of clarity, technical material that is known in the technical fields related to the invention has not been described in detail so that the present invention is not unnecessarily obscured.

[0091] The present invention provides a modified Legume plant exhibiting at least one improved domestication trait compared with a corresponding control or wild type Legume, wherein said modified Legume plant is a modified Peanut plant comprising at least one mutated Peanut (Arachis hypogaea) SP gene.

[0092] According to further aspects, the present invention provides a modified Legume plant exhibiting at least one improved domestication trait as compared to a corresponding control Legume plant, wherein said modified plant comprises a mutated SELF PRUNING (SP) Peanut (Arachis hypogaea) gene.

[0093] According to a further embodiment of the present invention, the Peanut (Arachis hypogaea) SP gene is selected from AhSP1-AhSP9 comprising a nucleic acid sequence with at least 75% sequence identity to a sequence selected from SEQ ID NO:1025, SEQ ID NO:1098, SEQ ID NO:1180, SEQ ID NO:1290, SEQ ID NO:1409, SEQ ID NO:1529, SEQ ID NO:1640, SEQ ID NO:1749 and SEQ ID NO:1928, respectively, or a functional variant thereof and any combination thereof.

[0094] The present invention further provides methods for producing the aforementioned modified Legume plant using genome editing or other genome modification techniques.

[0095] The solution proposed by the current invention is using genome editing such as the CRISPR/Cas system in order to create cultivated Legume plants with improved yield and more specifically with determinate growth habit. Breeding using genome editing allows a precise and significantly shorter breeding process in order to achieve these goals with a much higher success rate. Thus genome editing, has the potential to generate improved varieties faster and at a lower cost.

[0096] It is further noted that using genome editing is considered as non GMO by the Israeli regulator, and in the US, the USDA has already classified a dozen of genome edited plants as non-regulated and non GMO (https://www.usda.gov/media/press-releases/ 2018/03/28/secretary-perdue-issues-usda-statement-plant-breeding-innovation).

[0097] Legal limitations and outdated breeding techniques significantly hamper the efforts of generating new and improved Legume varieties adapted for intensive and advanced agriculture.

[0098] The present invention provides Legume plants with improved domestication traits such as plant architecture and plant habit adaptation. The current invention discloses the generation of non-transgenic Legume plants with improved yield traits, using the genome editing technology, e.g., the CRISPR/Cas9 highly precise tool. The generated mutations can be introduced into elite or locally adapted Legume lines rapidly, with relatively minimal effort and investment.

[0099] Genome editing is an efficient and useful tool for increasing crop productivity, and there is particular interest in advancing manipulation of domestication genes in

[0100] Legumes wild species, which often have undesirable characteristics.

[0101] Genome-editing technologies, such as the Clustered Regularly Interspaced Short Palindromic Repeats (CRISPR)-CRISPR-associated protein-9 nuclease (Cas9) (CRISPR-Cas9) provide opportunities to address these deficiencies, with the aims of increasing quality and yield, improve adaptation and expand geographical ranges of cultivation.

[0102] A major obstacle for CRISPR-Cas9 plant genome editing is lack of efficient tissue culture and transformation methodologies. The present invention achieves these aims and surprisingly provides transformed and regenerated Legume plants with modified desirable domestication genes.

[0103] To that end, guide RNAs (gRNAs) were designed for each of the target genes identified in Legumes to induce mutations in SP and genes through genome editing.

[0104] As used herein the term “about” denotes ±25% of the defined amount or measure or value.

[0105] As used herein the term “similar” denotes a correspondence or resemblance range of about ±20%, particularly ±15%, more particularly about ±10% and even more particularly about ±5%.

[0106] As used herein the term “corresponding” generally means similar, analogous, like, alike, akin, parallel, identical, resembling or comparable. In further aspects it means having or participating in the same relationship (such as type or degree, or species, kind, position, correspondence, function). It further means related or accompanying. In some embodiments of the present invention refers to plants of the same Legume species or strain or variety or to sibling plant, or one or more individuals having one or both parents in common.

[0107] A “plant” as used herein refers to any plant at any stage of development, particularly a seed plant. The term “plant” includes the whole plant or any parts or derivatives thereof, such as plant cells, seeds, plant protoplasts, plant cell tissue culture from which tomato plants can be regenerated, plant callus or calli, meristematic cells, microspores, embryos, immature embryos, pollen, ovules, anthers, fruit, flowers, leaves, cotyledons, pistil, seeds, seed coat, roots, root tips and the like.

[0108] The term “plant cell” used herein refers to a structural and physiological unit of a plant, comprising a protoplast and a cell wall. The plant cell may be in a form of an isolated single cell or a cultured cell.

[0109] The term “plant cell culture” as used herein means cultures of plant units such as, for example, protoplasts, regenerable cells, cell culture, cells, cells in plant tissues, pollen, pollen tubes, ovules, embryo sacs, zygotes and embryos at various stages of development, leaves, roots, root tips, anthers, meristematic cells, microspores, flowers, cotyledons, pistil, fruit, seeds, seed coat or any combination thereof.

[0110] The term “plant material” or “plant part” used herein refers to leaves, stems, roots, root tips, flowers or flower parts, fruits, pollen, egg cells, zygotes, seeds, seed coat, cuttings, cell or tissue cultures, or any other part or product of a plant or a combination thereof.

[0111] A “plant organ” as used herein means a distinct and visibly structured and differentiated part of a plant such as, but not limited to a root, stem, leaf, flower, flower bud, or embryo.

[0112] The term “Plant tissue” as used herein means a group of plant cells organized into a structural and functional unit. Any tissue of a plant in planta or in culture is included. This term includes, but is not limited to, plant organs, plant seeds, tissue culture, protoplasts, meristematic cells, calli and any group of plant cells organized into structural and/or functional units. The use of this term in conjunction with, or in the absence of, any specific type of plant tissue as listed above or otherwise embraced by this definition is not intended to be exclusive of any other type of plant tissue.

[0113] As used herein, the term “progeny” or “progenies” refers in a non-limiting manner to offspring or descendant plants. According to certain embodiments, the term “progeny” or “progenies” refers to plants developed or grown or produced from the disclosed or deposited seeds as detailed inter alia. The grown plants preferably have the desired traits of the disclosed or deposited seeds, i.e. loss of function mutation in at least one Peanut SP gene.

[0114] The term “Legume” refers hereinafter to a plant in the family Fabaceae (or Leguminosae), or the fruit or seed of such a plant. The legume family consists of plants that produce a pod with seeds inside.

[0115] The term “SELF-PRUNING” or “SP” in the context of the present invention refers to a gene which encodes a flowering repressor that modulates sympodial growth. It is herein shown that mutations in the SP orthologue cause an acceleration of sympodial cycling and shoot termination. It is further acknowledged that the SELF PRUNING (SP) gene controls the regularity of the vegetative-reproductive switch along the compound shoot of, for example, tomato, and thus conditions the ‘determinate’ (sp/sp) and ‘indeterminate’ (SP) growth habits of the plant. SP is a developmental regulator which is considered as similar to CENTRORADIALIS (CEN) from Antirrhinum and TERMINAL FLOWER 1 (TFL1) and FLOWERING LOCUS T (FT) from Arabidopsis.

[0116] The present invention discloses that SP is a member of a gene family in Legumes composed of at least 23 genes.

[0117] According to certain aspects of the present invention, the Legumes SP genes include Peanut SP genes.

[0118] The Peanut (Arachis hypogaea) SP gene is selected from AhSP1-AhSP9 comprising a genomic sequence as set forth in SEQ ID NO:1025, SEQ ID NO:1098, SEQ ID NO:1180, SEQ ID NO:1290, SEQ ID NO:1409, SEQ ID NO:1529, SEQ ID NO:1640, SEQ ID NO:1749 and SEQ ID NO:1928, respectively, and amino acid or polypeptide sequence as set forth in SEQ ID NO:1026, SEQ ID NO:1099, SEQ ID NO:1181, SEQ ID NO:1291, SEQ ID NO:1410, SEQ ID NO:1530, SEQ ID NO:1641, SEQ ID NO:1750 and SEQ ID NO:1929, respectively.

[0119] According to main aspects of the present invention, genome editing-targeted mutation in at least one of the aforementioned Peanut SP genes, which reduces the functional expression of the gene, affect the plant sympodial growth habit which plays a key role in determining plant architecture.

[0120] As used herein the term “genetic modification” refers hereinafter to genetic manipulation or modulation, which is the direct manipulation of an organism's genes using biotechnology. It also refers to a set of technologies used to change the genetic makeup of cells, including the transfer of genes within and across species, targeted mutagenesis and genome editing technologies to produce improved organisms. According to main embodiments of the present invention, modified Legume plants with improved domestication traits are generated using genome editing mechanism. This technique enables to achieve in planta modification of specific genes that relate to and/or control the flowering time and plant architecture in Legumes. The modification of the genes is aimed to result in modulated expression (preferably silencing) of the targeted genes, as compared to plants control lacking the generated modification.

[0121] The term “genome editing”, or “genome/genetic modification” or “genome engineering” or “gene editing” generally refers hereinafter to a type of genetic engineering in which DNA is inserted, deleted, modified or replaced in the genome of a living organism. Unlike previous genetic engineering techniques that randomly insert genetic material into a host genome, genome editing targets the insertions to site specific locations (e.g. specific genomic locus or loci).

[0122] It is within the scope of the present invention that the common methods for such editing use engineered nucleases, or “molecular scissors”. These nucleases create site-specific double-strand breaks (DSBs) at desired locations in the genome. The induced double-strand breaks are repaired through nonhomologous end-joining (NHEJ) or homologous recombination (HR), resulting in targeted mutations ('edits'). Families of engineered nucleases used by the current invention include, but are not limited to: meganucleases, zinc finger nucleases (ZFNs), transcription activator-like effector-based nucleases (TALEN), and the clustered regularly interspaced short palindromic repeats (CRISPR/Cas9) system.

[0123] Reference is now made to exemplary genome editing terms used by the current disclosure:

[0124] Cas=CRISPR-associated genes

[0125] Cas9, Csn1=a CRISPR-associated protein containing two nuclease domains, that is programmed by small RNAs to cleave DNA

[0126] crRNA=CRISPR RNA

[0127] dCAS9=nuclease-deficient Cas9

[0128] DSB=Double-Stranded Break

[0129] gRNA=guide RNA

[0130] HDR=Homology-Directed Repair

[0131] HNH=an endonuclease domain named for characteristic histidine and asparagine residues

[0132] Indel=insertion and/or deletion

[0133] NHEJ=Non-Homologous End Joining

[0134] PAM=Protospacer-Adjacent Motif

[0135] RuvC=an endonuclease domain named for an E. coli protein involved in DNA repair

[0136] sgRNA=single guide RNA

[0137] tracrRNA, trRNA=trans-activating crRNA

[0138] TALEN=Transcription-Activator Like Effector Nuclease

[0139] ZFN=Zinc-Finger Nuclease

[0140] According to specific aspects of the present invention, the CRISPR (Clustered Regularly Interspaced Short Palindromic Repeats) and CRISPR-associated (Cas) genes are used for the first time for generating genome modification in targeted genes in Legume plants. It is herein acknowledged that the functions of CRISPR (Clustered Regularly Interspaced Short Palindromic Repeats) and CRISPR-associated (Cas) genes are essential in adaptive immunity in selected bacteria and archaea, enabling the organisms to respond to and eliminate invading genetic material. These repeats were initially discovered in the 1980s in E. coli. Without wishing to be bound by theory, reference is now made to a type of CRISPR mechanism, in which invading DNA from viruses or plasmids is cut into small fragments and incorporated into a CRISPR locus comprising a series of short repeats (around 20 bps). The loci are transcribed, and transcripts are then processed to generate small RNAs (crRNA, namely CRISPR RNA), which are used to guide effector endonucleases that target invading DNA based on sequence complementarity.

[0141] According to further aspects of the invention, Cas protein, such as Cas9 (also known as Csn1) is required for gene silencing. Cas9 participates in the processing of crRNAs, and is responsible for the destruction of the target DNA. Cas9′s function in both of these steps relies on the presence of two nuclease domains, a RuvC-like nuclease domain located at the amino terminus, and a HNH-like nuclease domain that resides in the mid-region of the protein. To achieve site-specific DNA recognition and cleavage, Cas9 is complexed with both a crRNA and a separate trans-activating crRNA (tracrRNA or trRNA), that is partially complementary to the crRNA. The tracrRNA is required for crRNA maturation from a primary transcript encoding multiple pre-crRNAs. This occurs in the presence of RNase III and Cas9.

[0142] Without wishing to be bound by theory, it is herein acknowledged that during the destruction of target DNA, the HNH and RuvC-like nuclease domains cut both DNA strands, generating double-stranded breaks (DSBs) at sites defined by a 20-nucleotide target sequence within an associated crRNA transcript. The HNH domain cleaves the complementary strand, while the RuvC domain cleaves the noncomplementary strand.

[0143] It is further noted that the double-stranded endonuclease activity of Cas9 also requires that a short conserved sequence, (2-5 nts) known as protospacer-associated motif (PAM), follows immediately 3′- of the crRNA complementary sequence.

[0144] According to further aspects of the invention, a two-component system may be used by the current invention, combining trRNA and crRNA into a single synthetic single guide RNA (sgRNA) for guiding targeted gene alterations.

[0145] It is further within the scope that Cas9 nuclease variants include wild-type Cas9, Cas9D10A and nuclease-deficient Cas9 (dCas9).

[0146] Reference is now made to an example of CRISPR/Cas9 mechanism of action as depicted by Xie, Kabin, and Yinong Yang. “RNA-guided genome editing in plants using a CRISPR-Cas system.” Molecular plant 6.6 (2013): 1975-1983, incorporated herein by reference. As shown in this scientific publication, the Cas9 endonuclease forms a complex with a chimeric RNA (called guide RNA or gRNA), replacing the crRNA-transcrRNA heteroduplex, and the gRNA could be programmed to target specific sites. The gRNA-Cas9 should comprise at least 15-base-pairing (gRNA seed region) without mismatch between the 5′-end of engineered gRNA and targeted genomic site, and an NGG motif (called protospacer-adjacent motif or PAM) that follows the base-pairing region in the complementary strand of the targeted DNA.

[0147] The term “meganucleases” as used herein refers hereinafter to endodeoxyribonucleases characterized by a large recognition site (double-stranded DNA sequences of 12 to 40 base pairs); as a result this site generally occurs only once in any given genome. Meganucleases are therefore considered to be the most specific naturally occurring restriction enzymes.

[0148] The term “protospacer adjacent motif” or “PAM” as used herein refers hereinafter to a 2-6 base pair DNA sequence immediately following the DNA sequence targeted by the Cas9 nuclease in the CRISPR bacterial adaptive immune system. PAM is a component of the invading virus or plasmid, but is not a component of the bacterial CRISPR locus. PAM is an essential targeting component which distinguishes bacterial self from non-self DNA, thereby preventing the CRISPR locus from being targeted and destroyed by nuclease.

[0149] The term “Next-generation sequencing” or “NGS” as used herein refers hereinafter to massively, parallel, high-throughput or deep sequencing technology platforms that perform sequencing of millions of small fragments of DNA in parallel. Bioinformatics analyses are used to piece together these fragments by mapping the individual reads to the reference genome.

[0150] The term “gene knockdown” as used herein refers hereinafter to an experimental technique by which the expression of one or more of an organism's genes is reduced. The reduction can occur through genetic modification, i.e. targeted genome editing or by treatment with a reagent such as a short DNA or RNA oligonucleotide that has a sequence complementary to either gene or an mRNA transcript. The reduced expression can be at the level of RNA and/or at the level of protein. It is within the scope of the present invention that the term gene knockdown also refers to a loss of function mutation, gene knockout or silencing mutation in which an organism's genes is made inoperative or nonfunctional.

[0151] The term “gene silencing” as used herein refers hereinafter to the regulation of gene expression in a cell to prevent the expression of a certain gene. Gene silencing can occur during either transcription or translation. In certain aspects of the invention, gene silencing is considered to have a similar meaning as gene knockdown. When genes are silenced, their expression is reduced. In contrast, when genes are knocked out, they are completely not expressed. Gene silencing may be considered a gene knockdown mechanism since the methods used to silence genes, such as RNAi, CRISPR, or siRNA, generally reduce the expression of a gene by at least 70% but do not completely eliminate it.

[0152] The term “loss of function mutation” as used herein refers to a type of mutation in which the altered gene product lacks the function of the wild-type gene. A synonyms of the term included within the scope of the present invention is null mutation.

[0153] The term “microRNAs” or “miRNAs” refers hereinafter to small non-coding RNAs that have been found in most of the eukaryotic organisms. They are involved in the regulation of gene expression at the post-transcriptional level in a sequence specific manner. MiRNAs are produced from their precursors by Dicer-dependent small RNA biogenesis pathway. MiRNAs are candidates for studying gene function using different RNA-based gene silencing techniques. For example, artificial miRNAs (amiRNAs) targeting one or several genes of interest is a potential tool in functional genomics.

[0154] The term “in planta” means in the context of the present invention within the plant or plant cells. More specifically, it means introducing CRISPR/Cas complex into plant material comprising a tissue culture of several cells, a whole plant, or into a single plant cell, without introducing a foreign gene or a mutated gene. It also used to describe conditions present in a non-laboratory environment (e.g. in vivo).

[0155] The term ‘sympodial growth’ as used herein refers to a type of bifurcating branching pattern where one branch develops more strongly than the other, resulting in the stronger branches forming the primary shoot and the weaker branches appearing laterally. A sympodium, also referred to as a sympode or pseudaxis, is the primary shoot, comprising the stronger branches, formed during sympodial growth. In some aspects of the present invention, sympodial growth occurs when the apical meristem is terminated and growth is continued by one or more lateral meristems, which repeat the process. The apical meristem may be consumed to make an inflorescence or other determinate structure, or it may be aborted.

[0156] It is further within the scope of the current invention that the shoot section between two successive inflorescences is called the ‘sympodium’, and the number of leaf nodes per sympodium is referred to as the ‘sympodial index’ (spi). The first termination event activates the ‘sympodial cycle’. In sympodial plants, the apparent main shoot consists of a reiterated array of ‘sympodial units’. A mutant sp gene accelerates the termination of sympodial units but does not change the sympodial habit. The result is a progressive reduction in the number of vegetative nodes between inflorescences in a pattern that depends on light intensity and genetic background.

[0157] The term “earliness” refers hereinafter to early flowering and/or rapid transition from the vegetative to reproductive stages, or reduced ‘time to initiation of flowering’ and more generally to earlier completion of the life-cycle.

[0158] Plants having an “early flowering time” as used herein are plants which start to flower earlier than control plants. Hence this term refers to plants that show an earlier start of flowering. Flowering time of plants can be assessed by counting the number of days (“time to flower”) between sowing and the emergence of a first inflorescence. The “flowering time” of a plant can be determined using any method known in the art.

[0159] The term ‘reduced flowering time’ as used herein refers to time to production of first inflorescence. Such a trait can be evaluated or measured, for example, with reference to the number of leaves produced prior to appearance of the first inflorescence.

[0160] The term ‘harvest index’ can be herein defined as the total yield per plant weight.

[0161] The term ‘day length’ or ‘day length sensitivity’ as used in the context of the present invention generally refers to photoperiodism, which is the physiological reaction of organisms to the length of day or night. Photoperiodism can also be defined as the developmental responses of plants to the relative lengths of light and dark periods. Plants are classified under three groups according to the photoperiods: short-day plants, long-day plants, and day-neutral plants. Photoperiodism affects flowering by inducing the shoot to produce floral buds instead of leaves and lateral buds. It is within the scope of the present invention that Legumes are included within the short-day facultative plants. The Legume plants of the present invention are genetically modified so as to exhibit loss of day-length sensitivity, which is a highly desirable agronomical trait enabling enhanced yield of the cultivated crop.

[0162] The term ‘determinate’ or ‘determinate growth’ as used herein refers to plant growth in which the main stem ends in an inflorescence or other reproductive structure (e.g. a bud) and stops continuing to elongate indefinitely with only branches from the main stem having further and similarly restricted growth. It also refers to growth characterized by sequential flowering from the central or uppermost bud to the lateral or basal buds. It further means naturally self-limited growth, resulting in a plant of a definite maximum size.

[0163] The term ‘indeterminate’ or ‘indeterminate growth’ as used herein refers to plant growth in which the main stem continues to elongate indefinitely without being limited by a terminal inflorescence or other reproductive structure. It also refers to growth characterized by sequential flowering from the lateral or basal buds to the central or uppermost buds.

[0164] It is within the scope of the present invention that ‘yield related traits’ comprise one or more of early flowering time, yield, biomass, seed yield, early vigour, greenness index, increased growth rate and improved agronomic traits (such as improved plant architecture, i.e. determinate growth habit and enhanced nutritional value).

[0165] The term “yield” in general means a measurable produce of economic value, typically related to a specified crop, to an area, and to a period of time. Individual plant parts directly contribute to yield based on their number, size and/or weight, or the actual yield is the yield per square meter for a crop and year, which is determined by dividing total production (includes both harvested and appraised production) by planted square meters. The terms “yield” of a plant and “plant yield” are used interchangeably herein and are meant to refer to vegetative biomass such as root and/or shoot biomass, to reproductive organs, and/or to propagules such as seeds of that plant.

[0166] The terms “increase”, “improve” or “enhance” are interchangeable and shall mean in the sense of the application at least a 3%, 4%, 5%, 6%, 7%, 8%, 9% or 10%, preferably at least 15% or 20%, more preferably 258, 308, 35% or 40% more yield, growth or any other agronomic trait such as domestication trait or plant architecture, in comparison to control plants as defined herein.

[0167] Increased seed yield may be defined as one or more of the following: (a) an increase in seed biomass (total seed weight) which may be on an individual seed basis and/or per plant and/or per square meter; (b) increased number of flowers per plant; (c) increased number of seeds; and (d) increased harvest index, which is expressed as a ratio of the yield of harvestable parts, such as seeds, divided by the biomass of aboveground plant parts.

[0168] An increase in seed yield may also be manifested as an increase in seed size and/or seed volume.

[0169] The term “biomass” as used herein is intended to refer to the total weight of a plant. Within the definition of biomass, a distinction may be made between the biomass of one or more parts of a plant, which may include: aboveground (harvestable) parts such as but not limited to shoot biomass, seed biomass, leaf biomass, etc. and/or (harvestable) parts below ground, such as but not limited to root biomass, etc., and/or vegetative biomass such as root biomass, shoot biomass, etc., and/or reproductive organs, and/or propagules such as seed.

[0170] Control plant(s) within the scope of the present invention include corresponding wild type plants or corresponding naturally occurring plants or corresponding plants lacking the edited or mutated gene of interest or the specific generated mutation. The choice of suitable control plants is a routine part of an experimental setup and may include corresponding wild type plants or corresponding plants without the gene of interest. The control plant is typically of the same plant species or the same genetic background or even of the same variety as the plant to be assessed. The control plant of the plant to be assessed may also be plant individuals missing the transgene or modified/edited gene. A “control plant” or a “wild type” plant as used herein refers not only to whole plants, but also to plant parts, including seeds and seed parts.

[0171] The term “orthologue” as used herein refers hereinafter to one of two or more homologous gene sequences found in different species.

[0172] The term “functional variant” or “functional variant of a nucleic acid or amino acid sequence” as used herein refers to a sequence or part of a sequence which retains the biological function of the full non-variant allele (e.g. Peanut SP genes) and hence has the activity of SP expressed gene or protein. A functional variant also comprises a variant of the gene of interest encoding a polypeptide which has sequence alterations that do not affect function of the resulting protein, for example, in non-conserved residues. Also encompassed is a variant that is substantially identical, i.e. has only some sequence variations, for example, in non-conserved residues, to the wild type nucleic acid or amino acid sequences of the alleles as shown herein, and is biologically active.

[0173] The term ‘resistant’ or ‘less sensitive’ as used herein refers to plant growth in which the plant either expresses no symptoms or less symptoms of a disease conferred by an associated pathogen in comparison to a plant that is sensitive to such pathogen.

[0174] The term “variety” or “cultivar” used herein means a group of similar plants that by structural features and performance can be identified from other varieties within the same species.

[0175] The term “allele” used herein means any of one or more alternative or variant forms of a gene or a genetic unit at a particular locus, all of which alleles relate to one trait or characteristic at a specific locus. In a diploid cell of an organism, alleles of a given gene are located at a specific location, or locus (loci plural) on a chromosome. Alternative or variant forms of alleles may be the result of single nucleotide polymorphisms, insertions, inversions, translocations or deletions, or the consequence of gene regulation caused by, for example, by chemical or structural modification, transcription regulation or post-translational modification/regulation. An allele associated a with qualitative trait may comprise alternative or variant forms of various genetic units including those that are identical or associated with a single gene or multiple genes or their products or even a gene disrupting or controlled by a genetic factor contributing to the phenotype represented by the locus. According to further embodiments, the term “allele” designates any of one or more alternative forms of a gene at a particular locus. Heterozygous alleles are two different alleles at the same locus. Homozygous alleles are two identical alleles at a particular locus. A wild type allele is a naturally occurring allele. In the context of the current invention, the term allele refers to the 16 identified SP legumes genes, having the genomic nucleotide sequence as set forth in SEQ ID NO:1025, SEQ ID NO:1098, SEQ ID NO:1180, SEQ ID NO:1290, SEQ ID NO:1409, SEQ ID NO:1529, SEQ ID NO:1640, SEQ ID NO:1749 and SEQ ID NO:1928 for Peanut SP.

[0176] As used herein, the term “locus” (loci plural) means a specific place(s) or region(s) or a site(s) on a chromosome where for example a gene or genetic marker element or factor is found. In specific embodiments, such a genetic element is contributing to a trait.

[0177] As used herein, the term “homozygous” refers to a genetic condition or configuration existing when two identical or like alleles reside at a specific locus, but are positioned individually on corresponding pairs of homologous chromosomes in the cell of a diploid organism.

[0178] In specific embodiments, the Legume plants of the present invention comprise homozygous configuration of at least one of the mutated Peanut SP genes.

[0179] Conversely, as used herein, the term “heterozygous” means a genetic condition or configuration existing when two different or unlike alleles reside at a specific locus, but are positioned individually on corresponding pairs of homologous chromosomes in the cell of a diploid organism.

[0180] As used herein, the phrase “genetic marker” or “molecular marker” or “biomarker” refers to a feature in an individual's genome e.g., a nucleotide or a polynucleotide sequence that is associated with one or more loci or trait of interest In some embodiments, a genetic marker is polymorphic in a population of interest, or the locus occupied by the polymorphism, depending on context. Genetic markers or molecular markers include, for example, single nucleotide polymorphisms (SNPs), indels (i.e. insertions deletions), simple sequence repeats (SSRs), restriction fragment length polymorphisms (RFLPs), random amplified polymorphic DNAs (RAFDs), cleaved amplified polymorphic sequence (CAPS) markers, Diversity Arrays Technology (DArT) markers, and amplified fragment length polymorphisms (AFLPs) or combinations thereof, among many other examples such as the DNA sequence per se. Genetic markers can, for example, be used to locate genetic loci containing alleles on a chromosome that contribute to variability of phenotypic traits. The phrase “genetic marker” or “molecular marker” or “biomarker” can also refer to a polynucleotide sequence complementary or corresponding to a genomic sequence, such as a sequence of a nucleic acid used as a probe or primer.

[0181] As used herein, the term “germplasm” refers to the totality of the genotypes of a population or other group of individuals (e.g., a species). The term “germplasm” can also refer to plant material; e.g., a group of plants that act as a repository for various alleles. Such germplasm genotypes or populations include plant materials of proven genetic superiority; e.g., for a given environment or geographical area, and plant materials of unknown or unproven genetic value; that are not part of an established breeding population and that do not have a known relationship to a member of the established breeding population.

[0182] The terms “hybrid”, “hybrid plant” and “hybrid progeny” used herein refers to an individual produced from genetically different parents (e.g., a genetically heterozygous or mostly heterozygous individual).

[0183] As used herein, “sequence identity” or “identity” in the context of two nucleic acid or polypeptide sequences makes reference to the residues in the two sequences that are the same when aligned for maximum correspondence over a specified comparison window. When percentage of sequence identity is used in reference to proteins, it is recognized that residue positions which are not identical often differ by conservative amino acid substitutions, where amino acid residues are substituted for other amino acid residues with similar chemical properties (e.g., charge or hydrophobicity) and therefore do not change the functional properties of the molecule. The term further refers hereinafter to the amount of characters which match exactly between two different sequences. Hereby, gaps are not counted and the measurement is relational to the shorter of the two sequences.

[0184] It is further within the scope that the terms “similarity” and “identity” additionally refer to local homology, identifying domains that are homologous or similar (in nucleotide and/or amino acid sequence). It is acknowledged that bioinformatics tools such as BLAST, SSEARCH, FASTA, and HMMER calculate local sequence alignments which identify the most similar region between two sequences. For domains that are found in different sequence contexts in different proteins, the alignment should be limited to the homologous domain, since the domain homology is providing the sequence similarity captured in the score. According to some aspects the term similarity or identity further includes a sequence motif, which is a nucleotide or amino-acid sequence pattern that is widespread and has, or is conjectured to have, a biological significance. Proteins may have a sequence motif and/or a structural motif, a motif formed by the three-dimensional arrangement of amino acids which may not be adjacent.

[0185] As used herein, the terms “nucleic acid”, “nucleic acid sequence”, “nucleotide”, “nucleic acid molecule” or “polynucleotide” are intended to include DNA molecules (e.g., CDNA or genomic DNA), RNA molecules (e.g., mRNA), natural occurring, mutated, synthetic DNA or RNA molecules, and analogs of the DNA or RNA generated using nucleotide analogs. It can be single-stranded or double-stranded. Such nucleic acids or polynucleotides include, but are not limited to, coding sequences of structural genes, anti-sense sequences, and non-coding regulatory sequences that do not encode mRNAs or protein products. These terms also encompass a gene. The term “gene”, “allele” or “gene sequence” is used broadly to refer to a DNA nucleic acid associated with a biological function. Thus, genes may include introns and exons as in the genomic sequence, or may comprise only a coding sequence as in cDNAs, in their gene expressed form, and/or may include cDNAs in combination with regulatory sequences. Thus, according to the various aspects of the invention, genomic DNA, CDNA or coding DNA may be used. In one embodiment, the nucleic acid is cDNA or coding DNA.

[0186] The terms “peptide”, “polypeptide” and “protein” are used interchangeably herein and refer to amino acids in a polymeric form of any length, linked together by peptide bonds.

[0187] According to other aspects of the invention, a “modified” or a “mutant” plant is a plant that has been altered compared to the naturally occurring wild type (WT) or control plant. Specifically, the endogenous nucleic acid sequences of each of the SP homologs in Legumes (nucleic acid sequences comprising at least 75% sequence identity to SEQ ID NO:1025, SEQ ID NO:1098, SEQ ID NO:1180, SEQ ID NO:1290, SEQ ID NO:1409, SEQ ID NO:1529, SEQ ID NO:1640, SEQ ID NO:1749 and SEQ ID NO:1928 for Peanut SP genes) have been altered compared to wild type sequences using mutagenesis and/or genome editing methods as described herein. This causes inactivation of the endogenous SP gene and thus disables SP function and/or expression. Such plants have an altered phenotype and show improved domestication traits such as determinant plant architecture, synchronous and/or early flowering and loss of day length sensitivity compared to corresponding wild type plants or control plants lacking the SP modification. Therefore, the improved domestication phenotype is conferred by the presence of at least one mutated endogenous Peanut SP gene in the Legumes plant genome which has been specifically targeted using genome editing technique.

[0188] According to further aspects of the present invention, the at least one improved domestication trait is not conferred by the presence of transgenes expressed in Legumes.

[0189] It is further within the scope of the current invention that sp mutations that down-regulate or disrupt functional expression of the wild-type SP gene sequence, may be recessive, such that they are complemented by expression of a wild-type sequence.

[0190] It is further noted that according to certain aspects of the present invention, a wild type Legume plant is a plant that does not have any mutant sp allele.

[0191] Main aspects invention of the involve targeted mutagenesis methods, specifically genome editing, and exclude embodiments that are solely based on generating plants by traditional breeding methods. In a further embodiment of the current invention, as explained herein, the improved domestication of at least one trait is not due to the presence of a transgene.

[0192] The inventors have generated mutant Legume lines with mutations inactivating at least one Peanut SP gene homoeoallele which confer heritable improved domestication trait(s). In this way no functional at least one Peanut SP protein is made. Thus, the invention relates to these mutant Legume lines and related methods.

[0193] It is further within the scope of the present invention that breeding Legume cultivars with mutated sp allele enables the mechanical harvest of the plant. According to a further aspect of the present invention, loss of SP function results in compact Legume plants with reduced height, reduced number of sympodial units and determinate growth when compared with corresponding WT Legumes.

[0194] According to a main aspect of the present invention, modifying Legumes shoot architecture by selection for mutations in florigen flowering pathway genes allowed major improvements in plant architecture and yield. In particular, a mutation in an antiflorigen SELFPRUNING (SP) gene (sp classic) provided compact ‘determinate’ growth that translated to a burst of flowers, thereby enabling largescale field production.

[0195] The work inter alia described has important implications. The results have shown that CRISPR/Cas9 can be used to create heritable mutations in florigen pathway family members that result in desirable phenotypic effects.

[0196] To edit multiple domestication genes simultaneously and stack the resulting allelic variants, one option is that several gRNAs can be assembled to edit several genes into one construct, by using the Csy4 multi-gRNA system. The construct is then transformed via an appropriate vector into several Legume accessions.

[0197] It is further within the scope of the current invention that Legume SP genes having genomic nucleotide sequence as set forth in SEQ ID NO:1025, SEQ ID NO:1098, SEQ ID NO:1180, SEQ ID NO:1290, SEQ ID NO:1409, SEQ ID NO:1529, SEQ ID NO:1640, SEQ ID NO:1749 and SEQ ID NO:1928 for Peanut, are silenced by genome editing. Several mutated alleles have been identified. Notably, the plants with mutated sp alleles were more compact than the wild type plants lacking the mutated allele.

[0198] The loss of function mutation may be a deletion or insertion (“indels”) with reference the wild type Peanut SP gene allele sequence. The deletion may comprise 1-20 or more nucleotides, for example 1, 2, 3, 4, 5, 6, 7, 8, 9, 10, 1, 12, 13, 14, 15, 16, 17, 18 or 20 nucleotides or more in one or more strand. The insertion may comprise 1-20 or more nucleotides, for example 1, 2, 3, 4, 5, 6, 7, 8, 9, 10, 1, 12, 13, 14, 15, 16, 17, 18 or 20 or more nucleotides in one or more strand.

[0199] The plant of the invention includes plants wherein the plant is heterozygous for the each of the mutations. In a preferred embodiment however, the plant is homozygous for the mutations. Progeny that is also homozygous can be generated from these plants according to methods known in the art.

[0200] It is further within the scope that variants of a particular Peanut SP gene nucleotide or amino acid encoded sequence according to the various aspects of the invention will have at least about 50%- 99%, for example at least 75%, for example at least 85%, 86%, 87%, 88%, 89%, 90%, 92%, 94%, 95%, 96%, 97%, 98% or 99% or more sequence identity to that particular non-variant Peanut SP gene nucleotide sequence as shown in SEQ ID NO:1025, SEQ ID NO:1098, SEQ ID NO:1180, SEQ ID NO:1290, SEQ ID NO:1409, SEQ ID NO:1529, SEQ ID NO:1640, SEQ ID NO:1749 and SEQ ID NO:1928 for peanut.

[0201] Also, the various aspects of the invention encompass not only a Peanut SP genes or any other aforementioned nucleic acid sequence or amino acid sequence, but also fragments thereof. By “fragment” it is intended to mean a portion of the nucleotide sequence or a portion of the amino acid sequence and hence of the protein encoded thereby. Fragments of a nucleotide sequence may encode protein fragments that retain the biological activity of the native protein, in this case improved domestication trait.

[0202] According to a further embodiment of the invention, the herein newly identified Legume SP (Peanut SP genes) have been targeted using the double sgRNA strategy.

[0203] According to further embodiments of the present invention, DNA introduction into the plant cells can be done by Agrobacterium infiltration, virus based plasmids for delivery of the genome editing molecules and mechanical insertion of DNA (PEG mediated DNA transformation, biolistics, etc.).

[0204] In addition, it is within the scope of the present invention that the Cas9 protein is directly inserted together with a gRNA (ribonucleoprotein—RNP's) in order to bypass the need for in vivo transcription and translation of the Cas9+gRNA plasmid in planta to achieve gene editing.

[0205] It is also possible to create a genome edited plant and use it as a rootstock. Then, the Cas protein and gRNA can be transported via the vasculature system to the top of the plant and create the genome editing event in the scion.

[0206] It is within the scope of the present invention that the usage of CRISPR/Cas system for the generation of Legume plants with at least one improved domestication trait, allows the modification of predetermined specific DNA sequences without introducing foreign DNA into the genome by GMO techniques. According to one embodiment of the present invention, this is achieved by combining the Cas nuclease (e.g. Cas9, Cpf1 and the like) with a predefined guide RNA molecule (gRNA). The gRNA is complementary to a specific DNA sequence targeted for editing in the plant genome and which guides the Cas nuclease to a specific nucleotide sequence. The predefined gene specific gRNA's are cloned into the same plasmid as the Cas gene and this plasmid is inserted into plant cells. Insertion of the aforementioned plasmid DNA can be done, but not limited to, using different delivery systems, biological and/or mechanical, e.g. Agrobacterium infiltration, virus based plasmids for delivery of the genome editing molecules and mechanical insertion of DNA (PEG mediated DNA transformation, biolistics, etc.).

[0207] It is further within the scope of the present invention that upon reaching the specific predetermined DNA sequence, the Cas9 nuclease cleaves both DNA strands to create double stranded breaks leaving blunt ends. This cleavage site is then repaired by the cellular non homologous end joining DNA repair mechanism resulting in insertions or deletions which eventually create a mutation at the cleavage site. For example, it is acknowledged that a deletion form of the mutation consists of at least 1 base pair deletion. As a result of this base pair deletion the gene coding sequence is disrupted and the translation of the encoded protein is compromised either by a premature stop codon or disruption of a functional or structural property of the protein. Thus DNA is cut by the Cas9 protein and re-assembled by the cell's DNA repair mechanism.

[0208] It is further within the scope that improved domestication traits in Legume plants is herein produced by generating gRNA with homology to a specific site of predetermined genes in the Legumes genome i.e. SP gene, sub cloning this gRNA into a plasmid containing the Cas9 gene, and insertion of the plasmid into the Legume plant cells. In this way site specific mutations in the SP and aforementioned genes are generated thus effectively creating non-active molecules, resulting in determinant growth habit of the genome edited plant.

[0209] According to one embodiment, the present invention provides a modified Legume plant exhibiting at least one improved domestication trait as compared to a corresponding control Legume plant, wherein said modified plant comprises a mutated SELF PRUNING (SP) Peanut (Arachis hypogaea) gene.

[0210] According to a further embodiment, the present invention discloses the modified Legume plant as defined in any of the above, wherein said Peanut (Arachis hypogaea) SP gene is selected from AhSP1-AhSP9 comprising a nucleic acid sequence with at least 75% sequence identity to a sequence selected from SEQ ID NO:1025, SEQ ID NO:1098, SEQ ID NO:1180, SEQ ID NO:1290, SEQ ID NO:1409, SEQ ID NO:1529, SEQ ID NO:1640, SEQ ID NO:1749 and SEQ ID NO:1928, respectively, or a functional variant thereof and any combination thereof.

[0211] According to a further embodiment, the present invention discloses the modified Legume plant as defined in any of the above, wherein said mutation is introduced using mutagenesis, small interfering RNA (siRNA), microRNA (miRNA), artificial miRNA (amiRNA), DNA introgression, endonucleases or any combination thereof.

[0212] According to a further embodiment, the present invention discloses the modified Legume plant as defined in any of the above, wherein said mutation is introduced using targeted genome modification.

[0213] According to a further embodiment, the present invention discloses the modified Legume plant as defined in any of the above, wherein said mutation is introduced using CRISPR (Clustered Regularly Interspaced Short Palindromic Repeats) and CRISPR-associated (Cas) gene (CRISPR/Cas), Transcription activator-like effector nuclease (TALEN), Zinc Finger Nuclease (ZFN), meganuclease or any combination thereof.

[0214] According to a further embodiment, the present invention discloses the modified Legume plant as defined in any of the above, wherein said Cas gene is selected from the group consisting of Cas9, Cas12, Cas13, Cas14, CasX, CasY, Csn1, Cpf1 and any combination thereof.

[0215] According to a further embodiment, the present invention discloses the modified Legume plant as defined in any of the above, wherein the mutated SP gene is a CRISPR/Cas9-induced heritable mutated allele.

[0216] According to a further embodiment, the present invention discloses the modified Legume plant as defined in any of the above, wherein said mutation is a missense mutation, nonsense mutation, insertion, deletion, indel, substitution or duplication.

[0217] According to a further embodiment, the present invention discloses the modified Legume plant as defined in any of the above, wherein the insertion or the deletion produces a gene comprising a frameshift.

[0218] According to a further embodiment, the present invention discloses the modified Legume plant as defined in any of the above, wherein said plant is homozygous for said at least one mutated SP gene.

[0219] According to a further embodiment, the present invention discloses the modified Legume plant as defined in any of the above, wherein said mutation is in the coding region of said gene, a mutation in the regulatory region of said gene, or an epigenetic factor.

[0220] According to a further embodiment, the present invention discloses the modified Legume plant as defined in any of the above, wherein said mutation is a silencing mutation, a knockdown mutation, a knockout mutation, a loss of function mutation or any combination thereof.

[0221] According to a further embodiment, the present invention discloses the modified Legume plant as defined in any of the above, wherein said mutation is generated in planta.

[0222] According to a further embodiment, the present invention discloses the modified Legume plant as defined in any of the above, wherein said mutation is generated in planta via introduction of a construct comprising (a) Cas DNA and gRNA sequence selected from the group consisting of SEQ ID NO:1027-1097, SEQ ID NO:1100-1179, SEQ ID NO:1182-1289, SEQ ID NO:1292-1408, SEQ ID NO:1411-1528, SEQ ID NO:1531-1639, SEQ ID NO:1642-1748, SEQ ID NO:1751-1927 and SEQ ID NO:1930-2051, for said at least one Peanut SP gene, and any combination thereof, or (b) a ribonucleoprotein (RNP) complex comprising Cas protein and gRNA sequence selected from the group consisting of SEQ ID NO:1027-1097, SEQ ID NO:1100-1179, SEQ ID NO:1182-1289, SEQ ID NO:1292-1408, SEQ ID NO:1411-1528, SEQ ID NO:1531-1639, SEQ ID NO:1642-1748, SEQ ID NO:1751-1927 and SEQ ID NO:1930-2051 for said at least one Peanut SP gene, and any combination thereof.

[0223] According to a further embodiment, the present invention discloses the modified Legume plant as defined in any of the above, wherein said mutation in said at least one Peanut SP gene is generated in planta via introduction of a construct comprising (a) Cas DNA and gRNA sequence selected from the group consisting of SEQ ID NO:1027-1097, SEQ ID NO:1100-1179, SEQ ID NO:1182-1289, SEQ ID NO:1292-1408, SEQ ID NO:1411-1528, SEQ ID NO:1531-1639, SEQ ID NO:1642-1748, SEQ ID NO:1751-1927 and SEQ ID NO:1930-2051 for Peanut SEQ ID

[0224] NO:1025, SEQ ID NO:1098, SEQ ID NO:1180, SEQ ID NO:1290, SEQ ID NO:1409, SEQ ID NO:1529, SEQ ID NO:1640, SEQ ID NO:1749 and SEQ ID NO:1928, respectively, and any combination thereof, or (b) a ribonucleoprotein (RNP) complex comprising Cas protein and gRNA sequence selected from the group consisting of SEQ ID NO:1027-1097, SEQ ID NO:1100-1179, SEQ ID NO:1182-1289, SEQ ID NO:1292-1408, SEQ ID NO:1411-1528, SEQ ID NO:1531-1639, SEQ ID NO:1642-1748, SEQ ID NO:1751-1927 and SEQ ID NO:1930-2051 for Peanut SEQ ID NO:1025, SEQ ID NO:1098, SEQ ID NO:1180, SEQ ID NO:1290, SEQ ID NO:1409, SEQ ID NO:1529, SEQ ID NO:1640, SEQ ID NO:1749 and SEQ ID NO:1928, respectively, and any combination thereof.

[0225] According to a further embodiment, the present invention discloses the modified Legume plant as defined in any of the above, wherein said gRNA sequence comprises a 3′ NGG Protospacer Adjacent Motif (PAM).

[0226] According to a further embodiment, the present invention discloses the modified Legume plant as defined in any of the above, wherein said construct is introduced into the plant cells via Agrobacterium infiltration, virus-based plasmids for delivery of genome editing molecules, or mechanical insertion such as polyethylene glycol (PEG) mediated DNA transformation, electroporation or gene gun biolistics.

[0227] According to a further embodiment, the present invention discloses the modified Legume plant as defined in any of the above, wherein said mutation confers reduced expression of said at least one SP gene.

[0228] According to a further embodiment, the present invention discloses the modified Legume plant as defined in any of the above, wherein said modified plant has decreased expression levels of said SP gene.

[0229] According to a further embodiment, the present invention discloses the modified Legume plant as defined in any of the above, wherein the sequence of said expressed SP gene is selected from the group consisting of: at least 75% identity to any one of Peanut polypeptide SEQ ID NO:1026, SEQ ID NO:1099, SEQ ID NO:1181, SEQ ID NO:1291, SEQ ID NO:1410, SEQ ID NO:1530, SEQ ID NO:1641, SEQ ID NO:1750 and SEQ ID NO:1929, or a functional variant thereof.

[0230] According to a further embodiment, the present invention discloses the modified Legume plant as defined in any of the above, wherein said SP gene encodes a polypeptide sequence selected from the group consisting of: at least 75% identity to any one of Peanut polypeptide SEQ ID NO:1026, SEQ ID NO:1099, SEQ ID NO:1181, SEQ ID NO:1291, SEQ ID NO:1410, SEQ ID NO:1530, SEQ ID NO:1641, SEQ ID NO:1750 and SEQ ID NO:1929, or a functional variant thereof.

[0231] According to a further embodiment, the present invention discloses the modified Legume plant as defined in any of the above, wherein said modified plant is semi-determinant.

[0232] According to a further embodiment, the present invention discloses the modified Legume plant as defined in any of the above, wherein said modified plant has determinant growth habit.

[0233] According to a further embodiment, the present invention discloses the modified Legume plant as defined in any of the above, wherein said modified plant flowers earlier than a corresponding control Legume plant lacking said mutated SP gene.

[0234] According to a further embodiment, the present invention discloses the modified Legume plant as defined in any of the above, wherein said modified plant exhibits improved earliness as compared to a corresponding control Legume plant lacking said mutated SP gene.

[0235] According to a further embodiment, the present invention discloses the modified Legume plant as defined in any of the above, wherein said modified plant exhibits suppressed and/or similar sympodial shoot termination as compared to a corresponding control Legume plant lacking said mutated SP gene.

[0236] According to a further embodiment, the present invention discloses the modified Legume plant as defined in any of the above, wherein said domestication trait is selected from the group consisting of reduced flowering time, earliness, synchronous flowering, reduced day-length sensitivity, determinant or semi-determinant architecture, early termination of sympodial cycling, earlier axillary shoot flowering, compact growth habit, reduced height, reduced number of sympodial units, adaptation to mechanical harvest, higher harvest index and any combination thereof.

[0237] According to a further embodiment, the present invention discloses a modified Legume plant, plant part, plant tissue or plant cell as defined in any of the above, wherein said plant does not comprise a transgene.

[0238] According to a further embodiment, the present invention discloses a plant part, plant cell, plant pod or plant seed of a modified Legume plant as defined in any of the above.

[0239] According to a further embodiment, the present invention discloses a tissue culture of regenerable cells, protoplasts or callus obtained from the modified Legume plant as defined in any of the above.

[0240] According to a further embodiment, the present invention discloses a method for producing a modified Legume plant exhibiting at least one improved domestication trait compared with a corresponding control Legume, said method comprises steps of genetically modifying at least one Legume SELF PRUNING (SP) Peanut (Arachis hypogaea) gene, the resultant mutated SP gene has reduced expression level.

[0241] According to a further embodiment, the present invention discloses the method as defined in any of the above, wherein said method comprises steps of genetically modifying the at least one Legume SP gene using targeted genome editing introducing a loss of function mutation in the at least one Peanut (Arachis hypogaea) SP gene.

[0242] According to a further embodiment, the present invention discloses the method as defined in any of the above, wherein said Peanut (Arachis hypogaea) SP gene is selected from AhSP1-AhSP9 comprising a nucleic acid sequence with at least 75% sequence identity to a sequence selected from SEQ ID NO:1025, SEQ ID NO:1098, SEQ ID NO:1180, SEQ ID NO:1290, SEQ ID NO:1409, SEQ ID NO:1529, SEQ ID NO:1640, SEQ ID NO:1749 and SEQ ID NO:1928, or a functional variant thereof and any combination thereof.

[0243] According to a further embodiment, the present invention discloses the method as defined in any of the above, wherein said method comprises steps of: (a) identifying at least one Legume SP gene in a predetermined Legume plant; (b) synthetizing at least one guide RNA (gRNA) comprising a nucleotide sequence complementary to said at least one identified Legume SP gene; (c) transforming the predetermined Legume plant cells with a construct comprising (i) Cas nucleotide sequence operably linked to said at least one gRNA, or (ii) a ribonucleoprotein (RNP) complex comprising Cas protein and said at least one gRNA; (d) screening the genome of said transformed predetermined Legume plant cells for induced targeted loss of function mutation in said at least one Legume SP gene; (e) regenerating Legume plants carrying said loss of function mutation in at least one of said Legume SP gene; and (f) screening said regenerated plants for a Legume plant with improved domestication trait.

[0244] According to a further embodiment, the present invention discloses the method as defined in any of the above, wherein said step of screening the genome of said transformed plant cells for induced targeted loss of function mutation further comprises steps of obtaining a nucleic acid sample of said transformed plant and performing a nucleic acid amplification and optionally restriction enzyme digestion to detect a mutation in said at least one of said Legume SP gene.

[0245] According to a further embodiment, the present invention discloses the method as defined in any of the above, wherein said SP gene is selected from the group consisting of Peanut SP gene comprising a sequence having at least 75% identity to a sequence selected from SEQ ID NO:1025, SEQ ID NO:1098, SEQ ID NO:1180, SEQ ID NO:1290, SEQ ID NO:1409, SEQ ID NO:1529, SEQ ID NO:1640, SEQ ID NO:1749 and SEQ ID NO:1928, or a functional variant thereof and any combination thereof.

[0246] According to a further embodiment, the present invention discloses the method as defined in any of the above, wherein said mutation is introduced using mutagenesis, small interfering RNA (siRNA), microRNA (miRNA), artificial miRNA (amiRNA), DNA introgression, endonucleases or any combination thereof.

[0247] According to a further embodiment, the present invention discloses the method as defined in any of the above, wherein said mutation is introduced using targeted genome modification.

[0248] According to a further embodiment, the present invention discloses the method as defined in any of the above, wherein said mutation is introduced using CRISPR (Clustered Regularly Interspaced Short Palindromic Repeats) and CRISPR-associated (Cas) gene (CRISPR/Cas), Transcription activator-like effector nuclease (TALEN), Zinc Finger Nuclease (ZEN), meganuclease or any combination thereof.

[0249] According to a further embodiment, the present invention discloses the method as defined in any of the above, wherein said Cas gene is selected from the group consisting of Cas9, Cas12, Cas13, Cas14, CasX, CasY, Csn1, Cpf1 and any combination thereof.

[0250] According to a further embodiment, the present invention discloses the method as defined in any of the above, wherein the mutated SP gene is a CRISPR/Cas9-induced heritable mutated allele.

[0251] According to a further embodiment, the present invention discloses the method as defined in any of the above, wherein said mutation is a missense mutation, nonsense mutation, insertion, deletion, indel, substitution or duplication.

[0252] According to a further embodiment, the present invention discloses the method as defined in any of the above, wherein the insertion or the deletion produces a gene comprising a frameshift.

[0253] According to a further embodiment, the present invention discloses the method as defined in any of the above, wherein said plant is homozygous for said at least one Legume SP gene.

[0254] According to a further embodiment, the present invention discloses the method as defined in any of the above, wherein said mutation is in the coding region of said gene, a mutation in the regulatory region of said gene, or an epigenetic factor.

[0255] According to a further embodiment, the present invention discloses the method as defined in any of the above, wherein said mutation is a silencing mutation, a knockdown mutation, a knockout mutation, a loss of function mutation or any combination thereof.

[0256] According to a further embodiment, the present invention discloses the method as defined in any of the above, wherein said mutation is generated in planta.

[0257] According to a further embodiment, the present invention discloses the method as defined in any of the above, wherein said mutation is generated in planta via introduction of a construct comprising (a) Cas DNA and gRNA sequence selected from the group consisting of SEQ ID NO:1027-1097, SEQ ID NO:1100-1179, SEQ ID NO:1182-1289, SEQ ID NO:1292-1408, SEQ ID NO:1411-1528, SEQ ID NO:1531-1639, SEQ ID NO:1642-1748, SEQ ID NO:1751-1927 and SEQ ID NO:1930-2051, for said at least one Peanut SP gene, and any combination thereof, or (b) a ribonucleoprotein (RNP) complex comprising Cas protein and gRNA sequence selected from the group consisting of SEQ ID NO:1027-1097, SEQ ID NO:1100-1179, SEQ ID NO:1182-1289, SEQ ID NO:1292-1408, SEQ ID NO:1411-1528, SEQ ID NO:1531-1639, SEQ ID NO:1642-1748, SEQ ID NO:1751-1927 and SEQ ID NO:1930-2051, for said at least one Peanut SP gene, and any combination thereof.

[0258] According to a further embodiment, the present invention discloses the method as defined in any of the above, wherein said mutation in said Peanut SP genes is generated in planta via introduction of a construct comprising (a) Cas DNA and gRNA sequence selected from the group consisting of SEQ ID NO:1027-1097, SEQ ID NO:1100-1179, SEQ ID NO:1182-1289, SEQ ID NO:1292-1408, SEQ ID NO:1411-1528, SEQ ID NO:1531-1639, SEQ ID NO:1642-1748, SEQ ID NO:1751-1927 and SEQ ID NO:1930-2051 for Peanut SEQ ID NO:1025, SEQ ID NO:1098, SEQ ID NO:1180, SEQ ID NO:1290, SEQ ID NO:1409, SEQ ID NO:1529, SEQ ID NO:1640, SEQ ID NO:1749 and SEQ ID NO:1928, respectively, or (b) a ribonucleoprotein (RNP) complex comprising Cas protein and gRNA sequence selected from the group consisting of SEQ ID NO:1027-1097, SEQ ID NO:1100-1179, SEQ ID NO:1182-1289, SEQ ID NO:1292-1408, SEQ ID NO:1411-1528, SEQ ID NO:1531-1639, SEQ ID NO:1642-1748, SEQ ID NO:1751-1927 and SEQ ID NO:1930-2051 for Peanut SEQ ID NO:1025, SEQ ID NO:1098, SEQ ID NO:1180, SEQ ID NO:1290, SEQ ID NO:1409, SEQ ID NO:1529, SEQ ID NO:1640, SEQ ID NO:1749 and SEQ ID NO:1928, respectively.

[0259] According to a further embodiment, the present invention discloses the method as defined in any of the above, wherein said gRNA sequence comprises a 3′ NGG Protospacer Adjacent Motif (PAM).

[0260] According to a further embodiment, the present invention discloses the method as defined in any of the above, wherein said construct is introduced into the plant cells via Agrobacterium infiltration, virus based plasmids for delivery of the genome editing molecules or mechanical insertion such as polyethylene glycol (PEG) mediated DNA transformation, electroporation or gene gun biolistics.

[0261] According to a further embodiment, the present invention discloses the method as defined in any of the above, wherein said modified plant has decreased expression levels of at least one of said Legume SELF PRUNING (SP) gene.

[0262] According to a further embodiment, the present invention discloses the method as defined in any of the above, wherein said mutation confers reduced expression of said at least one SP gene.

[0263] According to a further embodiment, the present invention discloses the method as defined in any of the above, wherein the sequence of said expressed Legume SELF PRUNING (SP) gene is selected from the group consisting of: at least 75% identity to any one of Peanut polypeptide SEQ ID NO:1026, SEQ ID NO:1099, SEQ ID NO:1181, SEQ ID NO:1291, SEQ ID NO:1410, SEQ ID NO:1530, SEQ ID NO:1641, SEQ ID NO:1750 and SEQ ID NO:1929, or a functional variant thereof.

[0264] According to a further embodiment, the present invention discloses the method as defined in any of the above, wherein the Legume SELF PRUNING (SP) gene encodes a polypeptide sequence selected from the group consisting of: at least 75% identity to any one of Peanut polypeptide SEQ ID NO:1026, SEQ ID NO:1099, SEQ ID NO:1181, SEQ ID NO:1291, SEQ ID NO:1410, SEQ ID NO:1530, SEQ ID NO:1641, SEQ ID NO:1750 and SEQ ID NO:1929, or a functional variant thereof.

[0265] According to a further embodiment, the present invention discloses the method as defined in any of the above, wherein said modified plant is semi-determinant.

[0266] According to a further embodiment, the present invention discloses the method as defined in any of the above, wherein said modified plant has determinant growth habit.

[0267] According to a further embodiment, the present invention discloses the method as defined in any of the above, wherein said modified plant flowers earlier than a corresponding control Legume plant lacking said mutated SP gene.

[0268] According to a further embodiment, the present invention discloses the method as defined in any of the above, wherein said modified plant exhibits improved earliness as compared to a corresponding control Legume plant lacking said mutated SP gene.

[0269] According to a further embodiment, the present invention discloses the method as defined in any of the above, wherein said modified plant exhibits suppressed sympodial shoot termination as compared to a corresponding control Legume plant lacking said mutated SP gene.

[0270] According to a further embodiment, the present invention discloses the method as defined in any of the above, wherein said modified plant exhibits similar sympodial shoot termination as compared to a corresponding control Legume plant lacking said mutated SP gene.

[0271] According to a further embodiment, the present invention discloses the method as defined in any of the above, wherein said modified plant exhibits suppressed or reduced day-length sensitivity as compared to a corresponding control Legume plant lacking said mutated SP gene.

[0272] According to a further embodiment, the present invention discloses a modified Legume plant, plant part or plant cell produced by the method as defined in any of the above, wherein said modified plant does not comprise a transgene.

[0273] According to a further embodiment, the present invention discloses a plant part, plant cell, plant pod or plant seed of a modified Legume plant produced by the method as defined in any of the above.

[0274] According to a further embodiment, the present invention discloses a tissue culture of regenerable cells, protoplasts or callus obtained from the modified Legume plant produced by the method as defined in any of the above.

[0275] According to a further embodiment, the present invention discloses the method as defined in any of the above, wherein said at least one domestication trait is selected from the group consisting of reduced flowering time, earliness, synchronous flowering, reduced day-length sensitivity, determinant or semi-determinant architecture, early termination of sympodial cycling, earlier axillary shoot flowering, compact growth habit, reduced height, reduced number of sympodial units, adaptation to mechanical harvest, higher harvest index and any combination thereof.

[0276] According to a further embodiment, the present invention discloses an isolated polynucleotide sequence comprising at least 75% identity to a Legume SELF PRUNING (SP) sequence selected from the group consisting of SEQ ID NO:1, SEQ ID NO:113, SEQ ID NO:239, SEQ ID NO:340, SEQ ID NO:464, SEQ ID NO:616, SEQ ID NO:796, SEQ ID NO:1025, SEQ ID NO:1098, SEQ ID NO:1180, SEQ ID NO:1290, SEQ ID NO:1409, SEQ ID NO:1529, SEQ ID NO:1640, SEQ ID NO:1749 and SEQ ID NO:1928.

[0277] According to a further embodiment, the present invention discloses an isolated polypeptide sequence comprising at least 75% identity to a Legume SELF PRUNING (SP) sequence selected from the group consisting of SEQ ID NO:2, SEQ ID NO:114, SEQ ID NO:240, SEQ ID NO:341, SEQ ID NO:465, SEQ ID NO:617, SEQ ID NO:797, SEQ ID NO:1026, SEQ ID NO:1099, SEQ ID NO:1181, SEQ ID NO:1291, SEQ ID NO:1410, SEQ ID NO:1530, SEQ ID NO:1641, SEQ ID NO:1750 and SEQ ID NO:1929.

[0278] According to a further embodiment, the present invention discloses an isolated nucleotide sequence comprising at least 75% sequence identity to a Legume SELF PRUNING (SP)-targeted gRNA sequence selected from the group consisting of SEQ ID NO:3-112, SEQ ID NO:115-238, SEQ ID NO:241-339, SEQ ID NO:342-463, SEQ ID NO:466-615, SEQ ID NO:618-795, SEQ ID NO:798-1024, SEQ ID NO:1027-1097, SEQ ID NO:1100-1179, SEQ ID NO:1182-1289, SEQ ID NO:1292-1408, SEQ ID NO:1411-1528, SEQ ID NO:1531-1639, SEQ ID NO:1642-1748, SEQ ID NO:1751-1927 and SEQ ID NO:1930-2051.

[0279] According to a further embodiment, the present invention discloses harvestable parts of a modified Legume plant as defined in any of the above, wherein said harvestable parts are preferably shoot biomass and/or seeds.

[0280] According to a further embodiment, the present invention discloses products derived from a modified comprising at least 75% sequence identity to plant as defined in any of the above, and/or from harvestable parts of a modified Legume plant as defined in any of the above.

[0281] According to a further embodiment, the present invention discloses use of a nucleic acid encoding a polypeptide comprising at least 75% sequence identity to the sequence as defined in SEQ ID NO:2, SEQ ID NO:114, SEQ ID NO:240, SEQ ID NO:341, SEQ ID NO:465, SEQ ID NO:617, SEQ ID NO:797, SEQ ID NO:1026, SEQ ID NO:1099, SEQ ID NO:1181, SEQ ID NO:1291, SEQ ID NO:1410, SEQ ID NO:1530, SEQ ID NO:1641, SEQ ID NO:1750 and SEQ ID NO:1929, in enhancing yield and/or domestication, in Legume plants, relative to control plants.

[0282] In order to understand the invention and to see how it may be implemented in practice, a plurality of preferred embodiments will now be described, by way of non-limiting example only, with reference to the following examples.

### EXAMPLE 1

[0283] Production of Legume plants with improved domestication traits by targeted genome editing

[0284] Production of Legume lines with mutated sp gene may be achieved by at least one of the following breeding/cultivation schemes:

### Scheme 1

[0285] line stabilization by self pollination

[0286] Generation of F6 parental lines

[0287] Genome editing of parental lines

[0288] Crossing edited parental lines to generate an F1 hybrid plant

### Scheme 2

[0289] Identifying genes/alleles of interest

[0290] Designing gRNA

[0291] Transformation of plants with Cas9+gRNA constructs

[0292] Screening and identifying editing events

[0293] Genome editing of parental lines

[0294] It is noted that line stabilization may be performed by the following:

[0295] Induction of male flowering on plants

[0296] Self pollination

[0297] According to some embodiments of the present invention, line stabilization requires about 6 self-crossing 16 generations) and done through a single seed descent (SSD) approach.

[0298] F1 hybrid seed production: Novel hybrids are produced by crosses between different Legume strains.

[0299] According to a further aspect of the current invention, shortening line stabilization is performed by Doubled Haploids (DH). More specifically, the CRISPR-Cas9 system is transformed into microspores to achieve DH homozygous parental lines. A doubled haploid (DH) is a genotype formed when haploid cells undergo chromosome doubling. Artificial production of doubled haploids is important in plant breeding. It is herein acknowledged that conventional inbreeding procedures take about six generations to achieve approximately complete homozygosity, whereas doubled haploidy achieves it in one generation.

[0300] It is within the scope of the current invention that genetic markers specific for Legumes are developed and provided by the current invention:

[0301] Genotyping markers—germplasm used in the current invention is genotyped using molecular markers, in order to allow a more efficient breeding process and identification of the SP editing event.

[0302] It is further within the scope of the current invention that allele and genetic variation is analyzed for the Legume strains used.

[0303] Reference is now made to optional stages that have been used for the production of mutated SP Legume plants by genome editing:

[0304] Stage 1: Identifying Peanut SP genes.

[0305] SP orthologues have herein been identified in Peanut. These homologous genes have been sequenced and mapped. Peanut SP genes as set forth in SEQ ID NO:1025, SEQ ID NO:1098, SEQ ID NO:1180, SEQ ID NO:1290, SEQ ID NO:1409, SEQ ID NO:1529, SEQ ID NO:1640, SEQ ID NO:1749 and SEQ ID NO:1928.

[0306] Stage 2: Designing and synthesizing gRNA molecules corresponding to the sequence targeted for editing, i.e. sequences of each of the Peanut SP genes. It is noted that the editing event is preferably targeted to a unique restriction site sequence to allow easier screening for plants carrying an editing event within their genome. According to some aspects of the invention, the nucleotide sequence of the gRNAs should be completely compatible with the genomic sequence of the target gene. Therefore, for example, suitable gRNA molecules should be constructed for different SP homologues of different Legume strains.

[0307] Reference is now made to sequences of gRNA molecules targeted for silencing Peanut SP genes. Specifically, gRNA sequences SEQ ID NO:1027-1097, SEQ ID NO:1100-1179, SEQ ID NO:1182-1289, SEQ ID NO:1292-1408, SEQ ID NO:1411-1528, SEQ ID NO:1531-1639, SEQ ID NO:1642-1748, SEQ ID NO:1751-1927 and SEQ ID NO:1930-2051 are targeted for Peanut SP genes AhSP1-AhSP9, respectively, comprising sequence as set forth in SEQ ID NO:1025, SEQ ID NO:1098, SEQ ID NO:1180, SEQ ID NO:1290, SEQ ID NO:1409, SEQ ID NO:1529, SEQ ID NO:1640, SEQ ID NO:1749 and SEQ ID NO:1928, respectively. The term ‘PAM’ refers hereinafter to Protospacer Adjacent Motif, which is a 2-6 base pair DNA sequence immediately following the DNA sequence targeted by the Cas9 nuclease in the CRISPR bacterial adaptive immune system.

[0308] Reference is made to Table 1 presenting a summary of sequences within the scope of the current invention.

TABLE 2
Summary of Peanut (Arachis hypogaea) sequences within the scope of the present invention

| | AhSP1 | AhSP2 | AhSP3 | AhSP4 | AhSP5 | AhSP6 | AhSP7 | Ah SP8 | AhSP9 |
|---|---|---|---|---|---|---|---|---|---|
| Sequence | SEQ ID | SEQ ID | SEQ ID | SEQ ID | SEQ ID | SEQ ID | SEQ ID | SEQ ID | SEQ ID |
| type | NO | NO | NO | NO | NO | NO | NO | NO | NO |
| Genomic | 1025 | 1098 | 1180 | 1290 | 1409 | 1529 | 1640 | 1749 | 1928 |
| sequence | | | | | | | | | |
| Amino acid | 1026 | 1097 | 1181 | 1291 | 1410 | 1530 | 1641 | 1750 | 1929 |
| sequence | | | | | | | | | |
| gRNA | 1027- | 1100- | 1182- | 1292- | 1411- | 1531- | 1642- | 1751- | 1930- |
| sequence | 1097 | 1179 | 1289 | 1408 | 1528 | 1639 | 1748 | 1927 | 2051 |

[0309] The above gRNA molecules have been cloned into suitable vectors and their sequence has been verified. In addition different Cas9 versions have been analyzed for optimal compatibility between the Cas9 protein activity and the gRNA molecule in the Legume plant.

[0310] The efficiency of the designed gRNA molecules have been validated by transiently transforming Legume tissue culture. A plasmid carrying a gRNA sequence together with the Cas9 gene has been transformed into Legumes protoplasts. The protoplast cells have been grown for a short period of time and then were analyzed for existence of genome editing events. The positive constructs have been subjected to the herein established stable transformation protocol into Legume plant tissue for producing genome edited Legume plants in SP genes.

[0311] Stage 3: Transforming Legume plants using Agrobacterium or biolistics (gene gun) methods. For Agrobacterium and bioloistics, a DNA plasmid carrying (Cas9+gene specific gRNA) can be used. A vector containing a selection marker, Cas9 gene and relevant gene specific gRNA's is constructed. For biolistics, Ribonucleoprotein (RNP) complexes carrying (Cas9 protein+gene specific gRNA) are used. RNP complexes are created by mixing the Cas9 protein with relevant gene specific gRNA's.

[0312] According to some embodiments of the present invention, transformation of various Legume tissues was performed using particle bombardment of:
[0313] DNA vectors
[0314] Ribonucleoprotein complex (RNP's)

[0315] According to further embodiments of the present invention, transformation of various Legume tissues was performed using Agrobacterium (Agrobacterium tumefaciens) by:

[0316] Regeneration-based transformation

[0317] Floral-dip transformation

[0318] Seedling transformation

[0319] Transformation efficiency by A. tumefaciens has been compared to the bombardment method by transient GUS transformation experiment. After transformation, GUS staining of the transformants has been performed.

[0320] Screening for CRISPR/Cas9 gene editing events has been performed by at least one of the following analysis methods:

[0321] Restriction Fragment Length Polymorphism (RFLP)

[0322] Next Generation Sequencing (NGS)

[0323] PCR fragment analysis

[0324] Fluorescent-tag based screening

[0325] High resolution melting curve analysis (HRMA)

### REFERENCES

[0326] Tingdong Li, Xinping Yang, Yuan Yu, Xiaomin Si, Xiawan Zhai, Huawei Zhang, Wenxia Dong, Caixia Gao & Cao Xu. “Domestication of wild tomato is accelerated by genome editing” Nature Biotechnology 36 (2018): 1160-1163.
[0327] Agustin Zsögön, Tomáš Čermák, Emmanuel Rezende Naves, Marcela Morato Notini, Kai H Edel, Stefan Weinl, Luciano Freschi, Daniel F Voytas, Jörg Kudla & Lázaro Eustáquio Pereira Peres. “De novo domestication of wild tomato using genome editing”. Nature Biotechnology 36 (2018): 1211-1216.
[0328] Zachary H. Lemmon, Nathan T. Reem, Justin Dalrymple, Sebastian Soyk, Kerry E. Swartwood, Daniel Rodriguez-Leal, Joyce Van Eck & Zachary B. Lippman. “Rapid improvement of domestication traits in an orphan crop by genome editing”. Nature Plants 4 (2018): 766-770.
[0329] Xie Kabin, and Yinong Yang. “RNA-guided genome editing in plants using a CRISPR-Cas system” Molecular plant 6.6 (2013): 1975-1983.

1. A method for producing a modified Peanut plant exhibiting at least one improved domestication trait, wherein said method comprises steps of introducing by targeted genome editing a loss of function mutation in a Peanut (Arachis hypogaea) SELF PRUNING (SP) gene, said improved domestication trait is relative to a corresponding Peanut plant lacking the loss of function mutation.

2. The method according to claim 1, wherein said Peanut (Arachis hypogaea) SP gene is selected from AhSP1-AhSP9 comprising a nucleic acid sequence with at least 75% sequence identity to a sequence selected from SEQ ID NO:1025, SEQ ID NO:1098, SEQ ID NO:1180, SEQ ID NO:1290, SEQ ID NO:1409, SEQ ID NO:1529, SEQ ID NO:1640, SEQ ID NO:1749 and SEQ ID NO:1928, or a functional variant thereof and any combination thereof.

3. The method according to claim 1, wherein said method comprises steps of:
a. identifying the SP gene in a Peanut (Arachis hypogaea) plant;
b. synthetizing at least one guide RNA (gRNA) comprising a nucleotide sequence complementary to said at least one identified Peanut SP gene;
c. transforming the Peanut plant cells with a construct comprising (a) Cas nucleotide sequence operably linked to said at least one gRNA, or (b) a ribonucleoprotein (RNP) complex comprising Cas protein and said at least one gRNA;
d. screening the genome of said transformed predetermined Peanut plant cells for induced targeted loss of function mutation in said at least one Peanut SP gene;
e. regenerating Peanut plants carrying said loss of function mutation in at least one of said Peanut SP gene; and
f. screening said regenerated plants for a Peanut plant with improved domestication trait.

4. The method according to claim 3, wherein said step of screening the genome of said transformed plant cells for induced targeted loss of function mutation further comprises steps of obtaining a nucleic acid sample of said transformed plant and performing a nucleic acid amplification and optionally restriction enzyme digestion to detect a mutation in said at least one of said Peanut SP gene.

5. The method according to claim 1, wherein said SP gene is selected from the group consisting of Peanut SP gene comprising a sequence having at least 75% identity to a sequence selected from SEQ ID NO:1025, SEQ ID NO:1098, SEQ ID NO:1180, SEQ ID NO:1290, SEQ ID NO:1409, SEQ ID NO:1529, SEQ ID NO:1640, SEQ ID NO:1749 and SEQ ID NO:1928, or a functional variant thereof and any combination thereof.

6. The method according to claim 1, wherein said mutation is introduced using CRISPR (Clustered Regularly Interspaced Short Palindromic Repeats) and CRISPR-associated (Cas) gene (CRISPR/Cas), Transcription activator-like effector nuclease (TALEN), Zinc Finger Nuclease (ZFN), meganuclease or any combination thereof.

7. The method according to claim 6, wherein said Cas gene is selected from the group consisting of Cas9, Cas12, Cas13, Cas14, CasX, CasY, Csn1, Cpf1 and any combination thereof.

8. The method according to claim 1, wherein the mutated SP gene is a CRISPR/Cas9-induced heritable mutated allele.

9. The method according to claim 1, wherein said mutation is a missense mutation, nonsense mutation, insertion, deletion, indel, substitution or duplication.

10. The method according to claim 1, wherein said mutation is a silencing mutation, a knockdown mutation, a knockout mutation, a loss of function mutation or any combination thereof.

11. The method according to claim 1, wherein said mutation is generated in planta via introduction of a construct comprising (a) Cas DNA and gRNA sequence selected from the group consisting of SEQ ID NO:1027-1097, SEQ ID NO:1100-1179, SEQ ID NO:1182-1289, SEQ ID NO:1292-1408, SEQ ID NO:1411-1528, SEQ ID NO:1531-1639, SEQ ID NO:1642-1748, SEQ ID NO:1751-1927 and SEQ ID NO:1930-2051, for said at least one Peanut SP gene, and any combination thereof, or (b) a ribonucleoprotein (RNP) complex comprising Cas protein and gRNA sequence selected from the group consisting of SEQ ID NO:1027-1097, SEQ ID NO:1100-1179, SEQ ID NO:1182-1289, SEQ ID NO:1292-1408, SEQ ID NO:1411-1528, SEQ ID NO:1531-1639, SEQ ID NO:1642-1748, SEQ ID NO:1751-1927 and SEQ ID NO:1930-2051, for said at least one Peanut SP gene, and any combination thereof.

12. The method according to claim 1, wherein said mutation in said Peanut SP genes is generated in planta via introduction of a construct comprising (a) Cas DNA and gRNA sequence selected from the group consisting of SEQ ID NO:1027-1097, SEQ ID NO:1100-1179, SEQ ID NO:1182-1289, SEQ ID NO:1292-1408, SEQ ID NO:1411-1528, SEQ ID NO:1531-1639, SEQ ID NO:1642-1748, SEQ ID NO:1751-1927 and SEQ ID NO:1930-2051 for Peanut SEQ ID NO:1025, SEQ ID NO:1098, SEQ ID NO:1180, SEQ ID NO:1290, SEQ ID NO:1409, SEQ ID NO:1529, SEQ ID NO:1640, SEQ ID NO:1749 and SEQ ID NO:1928, respectively, or (b) a ribonucleoprotein (RNP) complex comprising Cas protein and gRNA sequence selected from the group consisting of SEQ ID NO:1027-1097, SEQ ID NO:1100-1179, SEQ ID NO:1182-1289, SEQ ID NO:1292-1408, SEQ ID NO:1411-1528, SEQ ID NO:1531-1639, SEQ ID NO:1642-1748, SEQ ID NO:1751-1927 and SEQ ID NO:1930-2051 for Peanut SEQ ID NO:1025, SEQ ID NO:1098, SEQ ID NO:1180, SEQ ID NO:1290, SEQ ID NO:1409, SEQ ID NO:1529, SEQ ID NO:1640, SEQ ID NO:1749 and SEQ ID NO:1928, respectively.

13. The method according to claim 12, wherein said gRNA sequence comprises a 3′ NGG Protospacer Adjacent Motif (PAM).

14. The method according to claim 12, wherein said construct is introduced into the plant cells via Agrobacterium infiltration, virus based plasmids for delivery of the genome editing molecules or mechanical insertion such as polyethylene glycol (PEG) mediated DNA transformation, electroporation or gene gun biolistics.

15. The method according to claim 13, wherein said gRNA sequence comprises a 3′ NGG Protospacer Adjacent Motif (PAM).

16. The method according to claim 13, wherein said construct is introduced into the plant cells via Agrobacterium infiltration, virus based plasmids for delivery of the genome editing molecules or mechanical insertion such as polyethylene glycol (PEG) mediated DNA transformation, electroporation or gene gun biolistics.

The application's sequence listing, which the Patent Office published only in electronic form, follows.

SEQUENCE LISTING (2051 sequences)

SEQ ID NO: 1 - DNA, 1165 bp, Vigna unguiculata
  source 1..1165: mol_type = genomic DNA
ttcacacacagcaaagcagcaacattaactatttggttgcaaaagcttgaaagtaaagtgtagctagcattttaactaatctttccatggccatgaacatgatatcaacagatcctcttgtgattgggagggtgatcggagatgttgtcgatcctttcactccaaccgtcaaaatcaccgtctcctacaacaataagcaggtctataacggtcatgagtttttcccttcctcagtaaccaccaagcccaaggttcagattcgtggaggcgacatgagatccttcttcacccttgtaaccatcttctttccctccactctccttcatcacttcaaccttttcatgcatctcactcactcttccatttccatgcctttctttcagctcatgatagatccagacgttcctggccccagtgatccatatctcagggaacacttacactggtatcatactaaaccatcacatgcagagtttacttggtttatgatttcatctgaaacaatgtgtctgaccatatttaacaactcacaggatagtcacagacatccctggcacaacggacaccacatttggtaagttatataatcttattacagacacataactttcataaaaatctgtgttttttttgttttgaacatgcaatggaacaggaaatgaggtggtgaactatgaaatcccaaggccaaacataggcatccataggtttgtgttcttccttttcaagcagaagtgcaggcaggcagtgatgaaaataccaagttctagggacctcttcaacaccaggacctttgcagaggacaatgaccttggccttcctgtggctgctgtgtttttcaatgctcaaagggaaactgctgccagaagacgttgaataatgaaccaacccacaaaagtgccacaatgtgcttatcactactaaagcctacatacctgtccactgcagtagtgcccaccaaataagtctaggtttctaagggtttgtggggcactttgtctagttaaattccaacttgcatgctgaaactctcgtagcatctaacattcttgtttctagtttcgtgttttcagtttgtaaccatttcagtttctgtttaactttctcgtaatctatgtctatgtcccagtaaccatgcaagttattattacattaactagtttta

SEQ ID NO: 2 - protein, 176 aa, Vigna unguiculata
MAMNMISTDPLVIGRVIGDVVDPFTPTVKITVSYNNKQVYNGHEFFPSSVTTKPKVQIRGGDMRSFFTLLMIDPDVPGPSDPYLREHLHWIVTDIPGTTDTTFGNEVVNYEIPRPNIGIHRFVFFLFKQKCRQAVMKIPSSRDLFNTRTFAEDNDLGLPVAAVFFNAQRETAARRR

SEQ ID NO: 3 - DNA, 20 bp, Vigna unguiculata
  source 1..20: mol_type = genomic DNA
aagcagcaacattaactatt

SEQ ID NO: 4 - DNA, 20 bp, Vigna unguiculata
  source 1..20: mol_type = genomic DNA
cattttaactaatctttcca

SEQ ID NO: 5 - DNA, 20 bp, Vigna unguiculata
  source 1..20: mol_type = genomic DNA
tgatatcatgttcatggcca

SEQ ID NO: 6 - DNA, 20 bp, Vigna unguiculata
  source 1..20: mol_type = genomic DNA
atctgttgatatcatgttca

SEQ ID NO: 7 - DNA, 20 bp, Vigna unguiculata
  source 1..20: mol_type = genomic DNA
atcaccctcccaatcacaag

SEQ ID NO: 8 - DNA, 20 bp, Vigna unguiculata
  source 1..20: mol_type = genomic DNA
tcaacagatcctcttgtgat

SEQ ID NO: 9 - DNA, 20 bp, Vigna unguiculata
  source 1..20: mol_type = genomic DNA
caacagatcctcttgtgatt

SEQ ID NO: 10 - DNA, 20 bp, Vigna unguiculata
  source 1..20: mol_type = genomic DNA
cagatcctcttgtgattggg

SEQ ID NO: 11 - DNA, 20 bp, Vigna unguiculata
  source 1..20: mol_type = genomic DNA
agatcctcttgtgattggga

SEQ ID NO: 12 - DNA, 20 bp, Vigna unguiculata
  source 1..20: mol_type = genomic DNA
cttgtgattgggagggtgat

SEQ ID NO: 13 - DNA, 20 bp, Vigna unguiculata
  source 1..20: mol_type = genomic DNA
attttgacggttggagtgaa

SEQ ID NO: 14 - DNA, 20 bp, Vigna unguiculata
  source 1..20: mol_type = genomic DNA
gagacggtgattttgacggt

SEQ ID NO: 15 - DNA, 20 bp, Vigna unguiculata
  source 1..20: mol_type = genomic DNA
gtaggagacggtgattttga

SEQ ID NO: 16 - DNA, 20 bp, Vigna unguiculata
  source 1..20: mol_type = genomic DNA
ctgcttattgttgtaggaga

SEQ ID NO: 17 - DNA, 20 bp, Vigna unguiculata
  source 1..20: mol_type = genomic DNA
atagacctgcttattgttgt

SEQ ID NO: 18 - DNA, 20 bp, Vigna unguiculata
  source 1..20: mol_type = genomic DNA
cgtctcctacaacaataagc

SEQ ID NO: 19 - DNA, 20 bp, Vigna unguiculata
  source 1..20: mol_type = genomic DNA
aacaataagcaggtctataa

SEQ ID NO: 20 - DNA, 20 bp, Vigna unguiculata
  source 1..20: mol_type = genomic DNA
gcttggtggttactgaggaa

SEQ ID NO: 21 - DNA, 20 bp, Vigna unguiculata
  source 1..20: mol_type = genomic DNA
ggcttggtggttactgagga

SEQ ID NO: 22 - DNA, 20 bp, Vigna unguiculata
  source 1..20: mol_type = genomic DNA
cttgggcttggtggttactg

SEQ ID NO: 23 - DNA, 20 bp, Vigna unguiculata
  source 1..20: mol_type = genomic DNA
aatctgaaccttgggcttgg

SEQ ID NO: 24 - DNA, 20 bp, Vigna unguiculata
  source 1..20: mol_type = genomic DNA
ctcagtaaccaccaagccca

SEQ ID NO: 25 - DNA, 20 bp, Vigna unguiculata
  source 1..20: mol_type = genomic DNA
acgaatctgaaccttgggct

SEQ ID NO: 26 - DNA, 20 bp, Vigna unguiculata
  source 1..20: mol_type = genomic DNA
cctccacgaatctgaacctt

SEQ ID NO: 27 - DNA, 20 bp, Vigna unguiculata
  source 1..20: mol_type = genomic DNA
gcctccacgaatctgaacct

SEQ ID NO: 28 - DNA, 20 bp, Vigna unguiculata
  source 1..20: mol_type = genomic DNA
aagcccaaggttcagattcg

SEQ ID NO: 29 - DNA, 20 bp, Vigna unguiculata
  source 1..20: mol_type = genomic DNA
cccaaggttcagattcgtgg

SEQ ID NO: 30 - DNA, 20 bp, Vigna unguiculata
  source 1..20: mol_type = genomic DNA
gatggttacaagggtgaaga

SEQ ID NO: 31 - DNA, 20 bp, Vigna unguiculata
  source 1..20: mol_type = genomic DNA
gggaaagaagatggttacaa

SEQ ID NO: 32 - DNA, 20 bp, Vigna unguiculata
  source 1..20: mol_type = genomic DNA
agggaaagaagatggttaca

SEQ ID NO: 33 - DNA, 20 bp, Vigna unguiculata
  source 1..20: mol_type = genomic DNA
gagagtggagggaaagaaga

SEQ ID NO: 34 - DNA, 20 bp, Vigna unguiculata
  source 1..20: mol_type = genomic DNA
aagtgatgaaggagagtgga

SEQ ID NO: 35 - DNA, 20 bp, Vigna unguiculata
  source 1..20: mol_type = genomic DNA
gaagtgatgaaggagagtgg

SEQ ID NO: 36 - DNA, 20 bp, Vigna unguiculata
  source 1..20: mol_type = genomic DNA
gttgaagtgatgaaggagag

SEQ ID NO: 37 - DNA, 20 bp, Vigna unguiculata
  source 1..20: mol_type = genomic DNA
tgaaaaggttgaagtgatga

SEQ ID NO: 38 - DNA, 20 bp, Vigna unguiculata
  source 1..20: mol_type = genomic DNA
agtgagtgagatgcatgaaa

SEQ ID NO: 39 - DNA, 20 bp, Vigna unguiculata
  source 1..20: mol_type = genomic DNA
ctgaaagaaaggcatggaaa

SEQ ID NO: 40 - DNA, 20 bp, Vigna unguiculata
  source 1..20: mol_type = genomic DNA
catgagctgaaagaaaggca

SEQ ID NO: 41 - DNA, 20 bp, Vigna unguiculata
  source 1..20: mol_type = genomic DNA
tctatcatgagctgaaagaa

SEQ ID NO: 42 - DNA, 20 bp, Vigna unguiculata
  source 1..20: mol_type = genomic DNA
tcactggggccaggaacgtc

SEQ ID NO: 43 - DNA, 20 bp, Vigna unguiculata
  source 1..20: mol_type = genomic DNA
atgatagatccagacgttcc

SEQ ID NO: 44 - DNA, 20 bp, Vigna unguiculata
  source 1..20: mol_type = genomic DNA
agatatggatcactggggcc

SEQ ID NO: 45 - DNA, 20 bp, Vigna unguiculata
  source 1..20: mol_type = genomic DNA
ccctgagatatggatcactg

SEQ ID NO: 46 - DNA, 20 bp, Vigna unguiculata
  source 1..20: mol_type = genomic DNA
tccctgagatatggatcact

SEQ ID NO: 47 - DNA, 20 bp, Vigna unguiculata
  source 1..20: mol_type = genomic DNA
ttccctgagatatggatcac

SEQ ID NO: 48 - DNA, 20 bp, Vigna unguiculata
  source 1..20: mol_type = genomic DNA
gccccagtgatccatatctc

SEQ ID NO: 49 - DNA, 20 bp, Vigna unguiculata
  source 1..20: mol_type = genomic DNA
tgtaagtgttccctgagata

SEQ ID NO: 50 - DNA, 20 bp, Vigna unguiculata
  source 1..20: mol_type = genomic DNA
ccccagtgatccatatctca

SEQ ID NO: 51 - DNA, 20 bp, Vigna unguiculata
  source 1..20: mol_type = genomic DNA
atctcagggaacacttacac

SEQ ID NO: 52 - DNA, 20 bp, Vigna unguiculata
  source 1..20: mol_type = genomic DNA
caagtaaactctgcatgtga

SEQ ID NO: 53 - DNA, 20 bp, Vigna unguiculata
  source 1..20: mol_type = genomic DNA
catcacatgcagagtttact

SEQ ID NO: 54 - DNA, 20 bp, Vigna unguiculata
  source 1..20: mol_type = genomic DNA
atcctgtgagttgttaaata

SEQ ID NO: 55 - DNA, 20 bp, Vigna unguiculata
  source 1..20: mol_type = genomic DNA
gaccatatttaacaactcac

SEQ ID NO: 56 - DNA, 20 bp, Vigna unguiculata
  source 1..20: mol_type = genomic DNA
aggatagtcacagacatccc

SEQ ID NO: 57 - DNA, 20 bp, Vigna unguiculata
  source 1..20: mol_type = genomic DNA
atgtggtgtccgttgtgcca

SEQ ID NO: 58 - DNA, 20 bp, Vigna unguiculata
  source 1..20: mol_type = genomic DNA
aatgtggtgtccgttgtgcc

SEQ ID NO: 59 - DNA, 20 bp, Vigna unguiculata
  source 1..20: mol_type = genomic DNA
cacagacatccctggcacaa

SEQ ID NO: 60 - DNA, 20 bp, Vigna unguiculata
  source 1..20: mol_type = genomic DNA
ggcacaacggacaccacatt

SEQ ID NO: 61 - DNA, 20 bp, Vigna unguiculata
  source 1..20: mol_type = genomic DNA
attatataacttaccaaatg

SEQ ID NO: 62 - DNA, 20 bp, Vigna unguiculata
  source 1..20: mol_type = genomic DNA
tttttgttttgaacatgcaa

SEQ ID NO: 63 - DNA, 20 bp, Vigna unguiculata
  source 1..20: mol_type = genomic DNA
ttttgaacatgcaatggaac

SEQ ID NO: 64 - DNA, 20 bp, Vigna unguiculata
  source 1..20: mol_type = genomic DNA
atgcaatggaacaggaaatg

SEQ ID NO: 65 - DNA, 20 bp, Vigna unguiculata
  source 1..20: mol_type = genomic DNA
caatggaacaggaaatgagg

SEQ ID NO: 66 - DNA, 20 bp, Vigna unguiculata
  source 1..20: mol_type = genomic DNA
tggtgaactatgaaatccca

SEQ ID NO: 67 - DNA, 20 bp, Vigna unguiculata
  source 1..20: mol_type = genomic DNA
ggatgcctatgtttggcctt

SEQ ID NO: 68 - DNA, 20 bp, Vigna unguiculata
  source 1..20: mol_type = genomic DNA
tggatgcctatgtttggcct

SEQ ID NO: 69 - DNA, 20 bp, Vigna unguiculata
  source 1..20: mol_type = genomic DNA
gaaatcccaaggccaaacat

SEQ ID NO: 70 - DNA, 20 bp, Vigna unguiculata
  source 1..20: mol_type = genomic DNA
aacctatggatgcctatgtt

SEQ ID NO: 71 - DNA, 20 bp, Vigna unguiculata
  source 1..20: mol_type = genomic DNA
ggccaaacataggcatccat

SEQ ID NO: 72 - DNA, 20 bp, Vigna unguiculata
  source 1..20: mol_type = genomic DNA
aaaggaagaacacaaaccta

SEQ ID NO: 73 - DNA, 20 bp, Vigna unguiculata
  source 1..20: mol_type = genomic DNA
gcctgcacttctgcttgaaa

SEQ ID NO: 74 - DNA, 20 bp, Vigna unguiculata
  source 1..20: mol_type = genomic DNA
tccttttcaagcagaagtgc

SEQ ID NO: 75 - DNA, 20 bp, Vigna unguiculata
  source 1..20: mol_type = genomic DNA
tttcaagcagaagtgcaggc

SEQ ID NO: 76 - DNA, 20 bp, Vigna unguiculata
  source 1..20: mol_type = genomic DNA
tgatgaaaataccaagttct

SEQ ID NO: 77 - DNA, 20 bp, Vigna unguiculata
  source 1..20: mol_type = genomic DNA
ttgaagaggtccctagaact

SEQ ID NO: 78 - DNA, 20 bp, Vigna unguiculata
  source 1..20: mol_type = genomic DNA
gatgaaaataccaagttcta

SEQ ID NO: 79 - DNA, 20 bp, Vigna unguiculata
  source 1..20: mol_type = genomic DNA
caaaggtcctggtgttgaag

SEQ ID NO: 80 - DNA, 20 bp, Vigna unguiculata
  source 1..20: mol_type = genomic DNA
ctagggacctcttcaacacc

SEQ ID NO: 81 - DNA, 20 bp, Vigna unguiculata
  source 1..20: mol_type = genomic DNA
attgtcctctgcaaaggtcc

SEQ ID NO: 82 - DNA, 20 bp, Vigna unguiculata
  source 1..20: mol_type = genomic DNA
caacaccaggacctttgcag

SEQ ID NO: 83 - DNA, 20 bp, Vigna unguiculata
  source 1..20: mol_type = genomic DNA
aaggtcattgtcctctgcaa

SEQ ID NO: 84 - DNA, 20 bp, Vigna unguiculata
  source 1..20: mol_type = genomic DNA
tttgcagaggacaatgacct

SEQ ID NO: 85 - DNA, 20 bp, Vigna unguiculata
  source 1..20: mol_type = genomic DNA
cagcagccacaggaaggcca

SEQ ID NO: 86 - DNA, 20 bp, Vigna unguiculata
  source 1..20: mol_type = genomic DNA
caatgaccttggccttcctg

SEQ ID NO: 87 - DNA, 20 bp, Vigna unguiculata
  source 1..20: mol_type = genomic DNA
aaaacacagcagccacagga

SEQ ID NO: 88 - DNA, 20 bp, Vigna unguiculata
  source 1..20: mol_type = genomic DNA
ttgaaaaacacagcagccac

SEQ ID NO: 89 - DNA, 20 bp, Vigna unguiculata
  source 1..20: mol_type = genomic DNA
ctgtgtttttcaatgctcaa

SEQ ID NO: 90 - DNA, 20 bp, Vigna unguiculata
  source 1..20: mol_type = genomic DNA
tgtgtttttcaatgctcaaa

SEQ ID NO: 91 - DNA, 20 bp, Vigna unguiculata
  source 1..20: mol_type = genomic DNA
gttcattattcaacgtcttc

SEQ ID NO: 92 - DNA, 20 bp, Vigna unguiculata
  source 1..20: mol_type = genomic DNA
attgtggcacttttgtgggt

SEQ ID NO: 93 - DNA, 20 bp, Vigna unguiculata
  source 1..20: mol_type = genomic DNA
gcacattgtggcacttttgt

SEQ ID NO: 94 - DNA, 20 bp, Vigna unguiculata
  source 1..20: mol_type = genomic DNA
agcacattgtggcacttttg

SEQ ID NO: 95 - DNA, 20 bp, Vigna unguiculata
  source 1..20: mol_type = genomic DNA
tagtagtgataagcacattg

SEQ ID NO: 96 - DNA, 20 bp, Vigna unguiculata
  source 1..20: mol_type = genomic DNA
actgcagtggacaggtatgt

SEQ ID NO: 97 - DNA, 20 bp, Vigna unguiculata
  source 1..20: mol_type = genomic DNA
tgggcactactgcagtggac

SEQ ID NO: 98 - DNA, 20 bp, Vigna unguiculata
  source 1..20: mol_type = genomic DNA
tttggtgggcactactgcag

SEQ ID NO: 99 - DNA, 20 bp, Vigna unguiculata
  source 1..20: mol_type = genomic DNA
gaaacctagacttatttggt

SEQ ID NO: 100 - DNA, 20 bp, Vigna unguiculata
  source 1..20: mol_type = genomic DNA
agaaacctagacttatttgg

SEQ ID NO: 101 - DNA, 20 bp, Vigna unguiculata
  source 1..20: mol_type = genomic DNA
cttagaaacctagacttatt

SEQ ID NO: 102 - DNA, 20 bp, Vigna unguiculata
  source 1..20: mol_type = genomic DNA
agtgcccaccaaataagtct

SEQ ID NO: 103 - DNA, 20 bp, Vigna unguiculata
  source 1..20: mol_type = genomic DNA
caaataagtctaggtttcta

SEQ ID NO: 104 - DNA, 20 bp, Vigna unguiculata
  source 1..20: mol_type = genomic DNA
aaataagtctaggtttctaa

SEQ ID NO: 105 - DNA, 20 bp, Vigna unguiculata
  source 1..20: mol_type = genomic DNA
tctaggtttctaagggtttg

SEQ ID NO: 106 - DNA, 20 bp, Vigna unguiculata
  source 1..20: mol_type = genomic DNA
ctaggtttctaagggtttgt

SEQ ID NO: 107 - DNA, 20 bp, Vigna unguiculata
  source 1..20: mol_type = genomic DNA
taggtttctaagggtttgtg

SEQ ID NO: 108 - DNA, 20 bp, Vigna unguiculata
  source 1..20: mol_type = genomic DNA
gagagtttcagcatgcaagt

SEQ ID NO: 109 - DNA, 20 bp, Vigna unguiculata
  source 1..20: mol_type = genomic DNA
aagttaaacagaaactgaaa

SEQ ID NO: 110 - DNA, 20 bp, Vigna unguiculata
  source 1..20: mol_type = genomic DNA
taataacttgcatggttact

SEQ ID NO: 111 - DNA, 20 bp, Vigna unguiculata
  source 1..20: mol_type = genomic DNA
ataataacttgcatggttac

SEQ ID NO: 112 - DNA, 20 bp, Vigna unguiculata
  source 1..20: mol_type = genomic DNA
taatgtaataataacttgca

SEQ ID NO: 113 - DNA, 1708 bp, Vigna unguiculata
  source 1..1708: mol_type = genomic DNA
cacacttggtttctgagcaggactatcaagttgtgttcttgtgttcttcagttttcactctctaaactttgttctcttacccttatttgcaatggcaagaatgcctttagaacctcttatagtggggagagtcataggagaggttcttgactctttcaccacaagcacaaaaatgactgtgagttataacaaaaagcaagtctacaatggccatgagtttttcccttcatctatcaacatcaaacccaaggttgagattgagggtggtgatatgagatcctttttcacactggtatctattttttttccttctctcttcttcttcctctttttctttaaacaccaaattaaagcttttaaaaaaggaaaataatgcttcagctgttatttgttgtcatatatatctttaatcatgctcacgcattatgtctcttttaatgaaagtttgccctttacaaaacaaacactgaatcattaaactaatgtctcccttttttggcgcagatcatgacagaccctgatgttccaggccctagtgacccttatctgagagaacacttgcactggtatacttaacacaaagataaactttgtttaaacttaaacccacccaccctaaacaacttaaatgaaaacattttgaaagtaatgaaccggttatataaccatccgacattcttgttagatgtgtgtgtctttgatcaagtttaaaaattttgcaagacatatgcattcctttcatcgcatcaaacaacagaggtaacaaacatgtatacatatacatatacatatacatacctttgtgtatatattctgtaaaagttgtaaggtgttgcagctaccatcgttttcctccacccaccctaaaaccaaaaacagttttaaagggtgaataaatctcggtgactgaacaacaaacataacagaactgcataggagatataaggtaaagtagcgattcttaggtatctaacagacaataattttgttttttgcaggatagtgacagacattccaggcacaacagatgctacatttggtaggttgatgtaaatgattgattagaaggaaaaatgtgggaacttacttgctgtgtgtgtggtgatcggatgcatgatgagagagactgacaaatgaaaaatgatgtttttttcttttgtagggaaagagttggtgagctatgagatcccaaaacctaatattgggattcataggtttgtgtttgtcctgttcaagcaaaagcgtagacagtgtgttactccacctagttcaagggatcacttcaacacacgcaatttcgcagcacagaacgagcttggcctcccagtggctgctgtctacttcaatgcacagagggaaacggctgcaagaagacgctagcttcctatacctatagttcctatagctatagcttctgctcctgcttgctcttatttaccactgcaaccaccaaagtagtagtttgaataaagccaaaagtacaacgagtttcagtactgcaacttcttaatcctcctcacatgtgcctcaaataactcgctcaaccaagtgaatcattttctagtttgactagtgtgtgtgctatgtttttactttcccatccaatgtgtaccttctgtattatatagtgtactacgttgtattattattacctcctggatactcctatgaggtgatcttatataaaccaataagaggtttggtgctc

SEQ ID NO: 114 - protein, 173 aa, Vigna unguiculata
MARMPLEPLIVGRVIGEVLDSFTTSTKMTVSYNKKQVYNGHEFFPSSINIKPKVEIEGGDMRSFFTLIMTDPDVPGPSDPYLREHLHWIVTDIPGTTDATFGKELVSYEIPKPNIGIHRFVFVLFKQKRRQCVTPPSSRDHFNTRNFAAQNELGLPVAAVYFNAQRETAARRR

SEQ ID NO: 115 - DNA, 20 bp, Vigna unguiculata
  source 1..20: mol_type = genomic DNA
attcttgccattgcaaataa

SEQ ID NO: 116 - DNA, 20 bp, Vigna unguiculata
  source 1..20: mol_type = genomic DNA
cattcttgccattgcaaata

SEQ ID NO: 117 - DNA, 20 bp, Vigna unguiculata
  source 1..20: mol_type = genomic DNA
tctcttacccttatttgcaa

SEQ ID NO: 118 - DNA, 20 bp, Vigna unguiculata
  source 1..20: mol_type = genomic DNA
cccactataagaggttctaa

SEQ ID NO: 119 - DNA, 20 bp, Vigna unguiculata
  source 1..20: mol_type = genomic DNA
atgactctccccactataag

SEQ ID NO: 120 - DNA, 20 bp, Vigna unguiculata
  source 1..20: mol_type = genomic DNA
gcctttagaacctcttatag

SEQ ID NO: 121 - DNA, 20 bp, Vigna unguiculata
  source 1..20: mol_type = genomic DNA
cctttagaacctcttatagt

SEQ ID NO: 122 - DNA, 20 bp, Vigna unguiculata
  source 1..20: mol_type = genomic DNA
ctttagaacctcttatagtg

SEQ ID NO: 123 - DNA, 20 bp, Vigna unguiculata
  source 1..20: mol_type = genomic DNA
cttatagtggggagagtcat

SEQ ID NO: 124 - DNA, 20 bp, Vigna unguiculata
  source 1..20: mol_type = genomic DNA
agtggggagagtcataggag

SEQ ID NO: 125 - DNA, 20 bp, Vigna unguiculata
  source 1..20: mol_type = genomic DNA
cacagtcatttttgtgcttg

SEQ ID NO: 126 - DNA, 20 bp, Vigna unguiculata
  source 1..20: mol_type = genomic DNA
aacaaaaagcaagtctacaa

SEQ ID NO: 127 - DNA, 20 bp, Vigna unguiculata
  source 1..20: mol_type = genomic DNA
tagatgaagggaaaaactca

SEQ ID NO: 128 - DNA, 20 bp, Vigna unguiculata
  source 1..20: mol_type = genomic DNA
gtttgatgttgatagatgaa

SEQ ID NO: 129 - DNA, 20 bp, Vigna unguiculata
  source 1..20: mol_type = genomic DNA
ggtttgatgttgatagatga

SEQ ID NO: 130 - DNA, 20 bp, Vigna unguiculata
  source 1..20: mol_type = genomic DNA
atctatcaacatcaaaccca

SEQ ID NO: 131 - DNA, 20 bp, Vigna unguiculata
  source 1..20: mol_type = genomic DNA
ccaccctcaatctcaacctt

SEQ ID NO: 132 - DNA, 20 bp, Vigna unguiculata
  source 1..20: mol_type = genomic DNA
accaccctcaatctcaacct

SEQ ID NO: 133 - DNA, 20 bp, Vigna unguiculata
  source 1..20: mol_type = genomic DNA
caaacccaaggttgagattg

SEQ ID NO: 134 - DNA, 20 bp, Vigna unguiculata
  source 1..20: mol_type = genomic DNA
aaacccaaggttgagattga

SEQ ID NO: 135 - DNA, 20 bp, Vigna unguiculata
  source 1..20: mol_type = genomic DNA
cccaaggttgagattgaggg

SEQ ID NO: 136 - DNA, 20 bp, Vigna unguiculata
  source 1..20: mol_type = genomic DNA
aatagataccagtgtgaaaa

SEQ ID NO: 137 - DNA, 20 bp, Vigna unguiculata
  source 1..20: mol_type = genomic DNA
tatgagatcctttttcacac

SEQ ID NO: 138 - DNA, 20 bp, Vigna unguiculata
  source 1..20: mol_type = genomic DNA
aagaggaagaagaagagaga

SEQ ID NO: 139 - DNA, 20 bp, Vigna unguiculata
  source 1..20: mol_type = genomic DNA
tttggtgtttaaagaaaaag

SEQ ID NO: 140 - DNA, 20 bp, Vigna unguiculata
  source 1..20: mol_type = genomic DNA
cttttttaaaagctttaatt

SEQ ID NO: 141 - DNA, 20 bp, Vigna unguiculata
  source 1..20: mol_type = genomic DNA
caaattaaagcttttaaaaa

SEQ ID NO: 142 - DNA, 20 bp, Vigna unguiculata
  source 1..20: mol_type = genomic DNA
ttcagtgtttgttttgtaaa

SEQ ID NO: 143 - DNA, 20 bp, Vigna unguiculata
  source 1..20: mol_type = genomic DNA
attcagtgtttgttttgtaa

SEQ ID NO: 144 - DNA, 20 bp, Vigna unguiculata
  source 1..20: mol_type = genomic DNA
aaactaatgtctcccttttt

SEQ ID NO: 145 - DNA, 20 bp, Vigna unguiculata
  source 1..20: mol_type = genomic DNA
tcatgatctgcgccaaaaaa

SEQ ID NO: 146 - DNA, 20 bp, Vigna unguiculata
  source 1..20: mol_type = genomic DNA
gtcatgatctgcgccaaaaa

SEQ ID NO: 147 - DNA, 20 bp, Vigna unguiculata
  source 1..20: mol_type = genomic DNA
cactagggcctggaacatca

SEQ ID NO: 148 - DNA, 20 bp, Vigna unguiculata
  source 1..20: mol_type = genomic DNA
tcactagggcctggaacatc

SEQ ID NO: 149 - DNA, 20 bp, Vigna unguiculata
  source 1..20: mol_type = genomic DNA
atgacagaccctgatgttcc

SEQ ID NO: 150 - DNA, 20 bp, Vigna unguiculata
  source 1..20: mol_type = genomic DNA
agataagggtcactagggcc

SEQ ID NO: 151 - DNA, 20 bp, Vigna unguiculata
  source 1..20: mol_type = genomic DNA
ctctcagataagggtcacta

SEQ ID NO: 152 - DNA, 20 bp, Vigna unguiculata
  source 1..20: mol_type = genomic DNA
tctctcagataagggtcact

SEQ ID NO: 153 - DNA, 20 bp, Vigna unguiculata
  source 1..20: mol_type = genomic DNA
gcaagtgttctctcagataa

SEQ ID NO: 154 - DNA, 20 bp, Vigna unguiculata
  source 1..20: mol_type = genomic DNA
tgcaagtgttctctcagata

SEQ ID NO: 155 - DNA, 20 bp, Vigna unguiculata
  source 1..20: mol_type = genomic DNA
atctgagagaacacttgcac

SEQ ID NO: 156 - DNA, 20 bp, Vigna unguiculata
  source 1..20: mol_type = genomic DNA
ttaagttgtttagggtgggt

SEQ ID NO: 157 - DNA, 20 bp, Vigna unguiculata
  source 1..20: mol_type = genomic DNA
tttaagttgtttagggtggg

SEQ ID NO: 158 - DNA, 20 bp, Vigna unguiculata
  source 1..20: mol_type = genomic DNA
tcatttaagttgtttagggt

SEQ ID NO: 159 - DNA, 20 bp, Vigna unguiculata
  source 1..20: mol_type = genomic DNA
ttcatttaagttgtttaggg

SEQ ID NO: 160 - DNA, 20 bp, Vigna unguiculata
  source 1..20: mol_type = genomic DNA
gttttcatttaagttgttta

SEQ ID NO: 161 - DNA, 20 bp, Vigna unguiculata
  source 1..20: mol_type = genomic DNA
tgttttcatttaagttgttt

SEQ ID NO: 162 - DNA, 20 bp, Vigna unguiculata
  source 1..20: mol_type = genomic DNA
acattttgaaagtaatgaac

SEQ ID NO: 163 - DNA, 20 bp, Vigna unguiculata
  source 1..20: mol_type = genomic DNA
atgtcggatggttatataac

SEQ ID NO: 164 - DNA, 20 bp, Vigna unguiculata
  source 1..20: mol_type = genomic DNA
catctaacaagaatgtcgga

SEQ ID NO: 165 - DNA, 20 bp, Vigna unguiculata
  source 1..20: mol_type = genomic DNA
cacacatctaacaagaatgt

SEQ ID NO: 166 - DNA, 20 bp, Vigna unguiculata
  source 1..20: mol_type = genomic DNA
ctgttgtttgatgcgatgaa

SEQ ID NO: 167 - DNA, 20 bp, Vigna unguiculata
  source 1..20: mol_type = genomic DNA
ttcatcgcatcaaacaacag

SEQ ID NO: 168 - DNA, 20 bp, Vigna unguiculata
  source 1..20: mol_type = genomic DNA
tttacagaatatatacacaa

SEQ ID NO: 169 - DNA, 20 bp, Vigna unguiculata
  source 1..20: mol_type = genomic DNA
tatattctgtaaaagttgta

SEQ ID NO: 170 - DNA, 20 bp, Vigna unguiculata
  source 1..20: mol_type = genomic DNA
gggtgggtggaggaaaacga

SEQ ID NO: 171 - DNA, 20 bp, Vigna unguiculata
  source 1..20: mol_type = genomic DNA
tttggttttagggtgggtgg

SEQ ID NO: 172 - DNA, 20 bp, Vigna unguiculata
  source 1..20: mol_type = genomic DNA
gtttttggttttagggtggg

SEQ ID NO: 173 - DNA, 20 bp, Vigna unguiculata
  source 1..20: mol_type = genomic DNA
actgtttttggttttagggt

SEQ ID NO: 174 - DNA, 20 bp, Vigna unguiculata
  source 1..20: mol_type = genomic DNA
aactgtttttggttttaggg

SEQ ID NO: 175 - DNA, 20 bp, Vigna unguiculata
  source 1..20: mol_type = genomic DNA
taaaactgtttttggtttta

SEQ ID NO: 176 - DNA, 20 bp, Vigna unguiculata
  source 1..20: mol_type = genomic DNA
ttaaaactgtttttggtttt

SEQ ID NO: 177 - DNA, 20 bp, Vigna unguiculata
  source 1..20: mol_type = genomic DNA
tcaccctttaaaactgtttt

SEQ ID NO: 178 - DNA, 20 bp, Vigna unguiculata
  source 1..20: mol_type = genomic DNA
aaaaccaaaaacagttttaa

SEQ ID NO: 179 - DNA, 20 bp, Vigna unguiculata
  source 1..20: mol_type = genomic DNA
aaaccaaaaacagttttaaa

SEQ ID NO: 180 - DNA, 20 bp, Vigna unguiculata
  source 1..20: mol_type = genomic DNA
tttaaagggtgaataaatct

SEQ ID NO: 181 - DNA, 20 bp, Vigna unguiculata
  source 1..20: mol_type = genomic DNA
caaacataacagaactgcat

SEQ ID NO: 182 - DNA, 20 bp, Vigna unguiculata
  source 1..20: mol_type = genomic DNA
agaactgcataggagatata

SEQ ID NO: 183 - DNA, 20 bp, Vigna unguiculata
  source 1..20: mol_type = genomic DNA
aaggtaaagtagcgattctt

SEQ ID NO: 184 - DNA, 20 bp, Vigna unguiculata
  source 1..20: mol_type = genomic DNA
acaataattttgttttttgc

SEQ ID NO: 185 - DNA, 20 bp, Vigna unguiculata
  source 1..20: mol_type = genomic DNA
aggatagtgacagacattcc

SEQ ID NO: 186 - DNA, 20 bp, Vigna unguiculata
  source 1..20: mol_type = genomic DNA
aatgtagcatctgttgtgcc

SEQ ID NO: 187 - DNA, 20 bp, Vigna unguiculata
  source 1..20: mol_type = genomic DNA
ggcacaacagatgctacatt

SEQ ID NO: 188 - DNA, 20 bp, Vigna unguiculata
  source 1..20: mol_type = genomic DNA
caacagatgctacatttggt

SEQ ID NO: 189 - DNA, 20 bp, Vigna unguiculata
  source 1..20: mol_type = genomic DNA
gatgtaaatgattgattaga

SEQ ID NO: 190 - DNA, 20 bp, Vigna unguiculata
  source 1..20: mol_type = genomic DNA
attgattagaaggaaaaatg

SEQ ID NO: 191 - DNA, 20 bp, Vigna unguiculata
  source 1..20: mol_type = genomic DNA
ttgattagaaggaaaaatgt

SEQ ID NO: 192 - DNA, 20 bp, Vigna unguiculata
  source 1..20: mol_type = genomic DNA
gaacttacttgctgtgtgtg

SEQ ID NO: 193 - DNA, 20 bp, Vigna unguiculata
  source 1..20: mol_type = genomic DNA
cttgctgtgtgtgtggtgat

SEQ ID NO: 194 - DNA, 20 bp, Vigna unguiculata
  source 1..20: mol_type = genomic DNA
atgatgtttttttcttttgt

SEQ ID NO: 195 - DNA, 20 bp, Vigna unguiculata
  source 1..20: mol_type = genomic DNA
tgatgtttttttcttttgta

SEQ ID NO: 196 - DNA, 20 bp, Vigna unguiculata
  source 1..20: mol_type = genomic DNA
ttcttttgtagggaaagagt

SEQ ID NO: 197 - DNA, 20 bp, Vigna unguiculata
  source 1..20: mol_type = genomic DNA
gaatcccaatattaggtttt

SEQ ID NO: 198 - DNA, 20 bp, Vigna unguiculata
  source 1..20: mol_type = genomic DNA
tgaatcccaatattaggttt

SEQ ID NO: 199 - DNA, 20 bp, Vigna unguiculata
  source 1..20: mol_type = genomic DNA
gagatcccaaaacctaatat

SEQ ID NO: 200 - DNA, 20 bp, Vigna unguiculata
  source 1..20: mol_type = genomic DNA
agatcccaaaacctaatatt

SEQ ID NO: 201 - DNA, 20 bp, Vigna unguiculata
  source 1..20: mol_type = genomic DNA
aacctatgaatcccaatatt

SEQ ID NO: 202 - DNA, 20 bp, Vigna unguiculata
  source 1..20: mol_type = genomic DNA
aacctaatattgggattcat

SEQ ID NO: 203 - DNA, 20 bp, Vigna unguiculata
  source 1..20: mol_type = genomic DNA
gtctacgcttttgcttgaac

SEQ ID NO: 204 - DNA, 20 bp, Vigna unguiculata
  source 1..20: mol_type = genomic DNA
aagtgatcccttgaactagg

SEQ ID NO: 205 - DNA, 20 bp, Vigna unguiculata
  source 1..20: mol_type = genomic DNA
gtgttactccacctagttca

SEQ ID NO: 206 - DNA, 20 bp, Vigna unguiculata
  source 1..20: mol_type = genomic DNA
ttgaagtgatcccttgaact

SEQ ID NO: 207 - DNA, 20 bp, Vigna unguiculata
  source 1..20: mol_type = genomic DNA
tgttactccacctagttcaa

SEQ ID NO: 208 - DNA, 20 bp, Vigna unguiculata
  source 1..20: mol_type = genomic DNA
ttcgcagcacagaacgagct

SEQ ID NO: 209 - DNA, 20 bp, Vigna unguiculata
  source 1..20: mol_type = genomic DNA
gaacgagcttggcctcccag

SEQ ID NO: 210 - DNA, 20 bp, Vigna unguiculata
  source 1..20: mol_type = genomic DNA
agtagacagcagccactggg

SEQ ID NO: 211 - DNA, 20 bp, Vigna unguiculata
  source 1..20: mol_type = genomic DNA
tgaagtagacagcagccact

SEQ ID NO: 212 - DNA, 20 bp, Vigna unguiculata
  source 1..20: mol_type = genomic DNA
ttgaagtagacagcagccac

SEQ ID NO: 213 - DNA, 20 bp, Vigna unguiculata
  source 1..20: mol_type = genomic DNA
ctgtctacttcaatgcacag

SEQ ID NO: 214 - DNA, 20 bp, Vigna unguiculata
  source 1..20: mol_type = genomic DNA
tgtctacttcaatgcacaga

SEQ ID NO: 215 - DNA, 20 bp, Vigna unguiculata
  source 1..20: mol_type = genomic DNA
cttcaatgcacagagggaaa

SEQ ID NO: 216 - DNA, 20 bp, Vigna unguiculata
  source 1..20: mol_type = genomic DNA
gctataggaactataggtat

SEQ ID NO: 217 - DNA, 20 bp, Vigna unguiculata
  source 1..20: mol_type = genomic DNA
gctatagctataggaactat

SEQ ID NO: 218 - DNA, 20 bp, Vigna unguiculata
  source 1..20: mol_type = genomic DNA
ggagcagaagctatagctat

SEQ ID NO: 219 - DNA, 20 bp, Vigna unguiculata
  source 1..20: mol_type = genomic DNA
agtggtaaataagagcaagc

SEQ ID NO: 220 - DNA, 20 bp, Vigna unguiculata
  source 1..20: mol_type = genomic DNA
tactactttggtggttgcag

SEQ ID NO: 221 - DNA, 20 bp, Vigna unguiculata
  source 1..20: mol_type = genomic DNA
tattcaaactactactttgg

SEQ ID NO: 222 - DNA, 20 bp, Vigna unguiculata
  source 1..20: mol_type = genomic DNA
ctttattcaaactactactt

SEQ ID NO: 223 - DNA, 20 bp, Vigna unguiculata
  source 1..20: mol_type = genomic DNA
actgaaactcgttgtacttt

SEQ ID NO: 224 - DNA, 20 bp, Vigna unguiculata
  source 1..20: mol_type = genomic DNA
tatttgaggcacatgtgagg

SEQ ID NO: 225 - DNA, 20 bp, Vigna unguiculata
  source 1..20: mol_type = genomic DNA
agttatttgaggcacatgtg

SEQ ID NO: 226 - DNA, 20 bp, Vigna unguiculata
  source 1..20: mol_type = genomic DNA
ttggttgagcgagttatttg

SEQ ID NO: 227 - DNA, 20 bp, Vigna unguiculata
  source 1..20: mol_type = genomic DNA
aaactagaaaatgattcact

SEQ ID NO: 228 - DNA, 20 bp, Vigna unguiculata
  source 1..20: mol_type = genomic DNA
acagaaggtacacattggat

SEQ ID NO: 229 - DNA, 20 bp, Vigna unguiculata
  source 1..20: mol_type = genomic DNA
tacagaaggtacacattgga

SEQ ID NO: 230 - DNA, 20 bp, Vigna unguiculata
  source 1..20: mol_type = genomic DNA
ataatacagaaggtacacat

SEQ ID NO: 231 - DNA, 20 bp, Vigna unguiculata
  source 1..20: mol_type = genomic DNA
agtacactatataatacaga

SEQ ID NO: 232 - DNA, 20 bp, Vigna unguiculata
  source 1..20: mol_type = genomic DNA
gttgtattattattacctcc

SEQ ID NO: 233 - DNA, 20 bp, Vigna unguiculata
  source 1..20: mol_type = genomic DNA
acctcataggagtatccagg

SEQ ID NO: 234 - DNA, 20 bp, Vigna unguiculata
  source 1..20: mol_type = genomic DNA
atcacctcataggagtatcc

SEQ ID NO: 235 - DNA, 20 bp, Vigna unguiculata
  source 1..20: mol_type = genomic DNA
acctcctggatactcctatg

SEQ ID NO: 236 - DNA, 20 bp, Vigna unguiculata
  source 1..20: mol_type = genomic DNA
tttatataagatcacctcat

SEQ ID NO: 237 - DNA, 20 bp, Vigna unguiculata
  source 1..20: mol_type = genomic DNA
atcttatataaaccaataag

SEQ ID NO: 238 - DNA, 20 bp, Vigna unguiculata
  source 1..20: mol_type = genomic DNA
atataaaccaataagaggtt

SEQ ID NO: 239 - DNA, 1261 bp, Vigna unguiculata
  source 1..1261: mol_type = genomic DNA
gttttttttttttccattcttctgtttcctccttcaccttgttgctgcaaccatggcaagagtatccacagatccactggttattgggagagtgataggagatgttcttgattctttcactccaaccataaaaatgactgtaacattctgtaagaagcaagtctacaatggccatgaactctttccttccacagttaccacatggcccagggttgagattggtggaggagatttgagatccttctttacactggtatatatatttatttccttttatttattgaacaaaaaagaactttatatatatttctttcaaaacttcaatcatgtaggcatgaaaaaaaaaccttcaatcatttgaaataaatgtctcctttttctctttgcagattatgacagaccctgatgtcccaggacctagtgacccttatctgagagaacatctgcactggtactttaacagatattgcctgaaattaaccgtttgtatttttcttcatttattggctgaataatatatttacctgaaaaccaaaccaattctaaactgagagaaggaaaaactctgaaacagttataaatattttaaaacatcaaattttgacattgaaaatcaattctatgcaccaaattggttttccatgaagggttataaaagttctaagttctaaccaaagacctaattttactgtgtgtggataaatacacacacacacacactactgtgcaaatcaaagcaaagaaattttcaggtttcagctgaaattgtgcccttttgcaggatggtgacagacataccaggcacaacaaatgcttcatttggtaactttatatttatttaagatgtactaaaaaaaatgtatgatcagaaatatacttaatccatgtttttgttccgttctttttggggtagggaatgtgttggttagctatgaaatgccaaagcctaacatagggatacacaggtttgtgtttgtcctgttccagcaaaaacgtaggcagtgtgttactccaccttcttcgagggacaactttaacactcgaaaattttcatccgagaacgaccttggactccctgttgctgctgtctacttcaatgcacagagggaaactgctgctagaagacgctaatatatatggctacttctgcaatgcaaccaatgtactcaataacgttatcttcacgtaggggcctagtttcacttctaaaccatcgtgtcgcttgaaatagctcgcagaaatgttttcttttttagtaact

SEQ ID NO: 240 - protein, 173 aa, Vigna unguiculata
MARVSTDPLVIGRVIGDVLDSFTPTIKMTVTFCKKQVYNGHELFPSTVTTWPRVEIGGGDLRSFFTLIMTDPDVPGPSDPYLREHLHWMVTDIPGTTNASFGNVLVSYEMPKPNIGIHRFVFVLFQQKRRQCVTPPSSRDNFNTRKFSSENDLGLPVAAVYFNAQRETAARRR

SEQ ID NO: 241 - DNA, 20 bp, Vigna unguiculata
  source 1..20: mol_type = genomic DNA
tgaaggaggaaacagaagaa

SEQ ID NO: 242 - DNA, 20 bp, Vigna unguiculata
  source 1..20: mol_type = genomic DNA
ttgcagcaacaaggtgaagg

SEQ ID NO: 243 - DNA, 20 bp, Vigna unguiculata
  source 1..20: mol_type = genomic DNA
tggttgcagcaacaaggtga

SEQ ID NO: 244 - DNA, 20 bp, Vigna unguiculata
  source 1..20: mol_type = genomic DNA
ttgccatggttgcagcaaca

SEQ ID NO: 245 - DNA, 20 bp, Vigna unguiculata
  source 1..20: mol_type = genomic DNA
tcaccttgttgctgcaacca

SEQ ID NO: 246 - DNA, 20 bp, Vigna unguiculata
  source 1..20: mol_type = genomic DNA
atctgtggatactcttgcca

SEQ ID NO: 247 - DNA, 20 bp, Vigna unguiculata
  source 1..20: mol_type = genomic DNA
cccaataaccagtggatctg

SEQ ID NO: 248 - DNA, 20 bp, Vigna unguiculata
  source 1..20: mol_type = genomic DNA
aagagtatccacagatccac

SEQ ID NO: 249 - DNA, 20 bp, Vigna unguiculata
  source 1..20: mol_type = genomic DNA
atcactctcccaataaccag

SEQ ID NO: 250 - DNA, 20 bp, Vigna unguiculata
  source 1..20: mol_type = genomic DNA
tccacagatccactggttat

SEQ ID NO: 251 - DNA, 20 bp, Vigna unguiculata
  source 1..20: mol_type = genomic DNA
ccacagatccactggttatt

SEQ ID NO: 252 - DNA, 20 bp, Vigna unguiculata
  source 1..20: mol_type = genomic DNA
ctggttattgggagagtgat

SEQ ID NO: 253 - DNA, 20 bp, Vigna unguiculata
  source 1..20: mol_type = genomic DNA
gttacagtcatttttatggt

SEQ ID NO: 254 - DNA, 20 bp, Vigna unguiculata
  source 1..20: mol_type = genomic DNA
gaatgttacagtcattttta

SEQ ID NO: 255 - DNA, 20 bp, Vigna unguiculata
  source 1..20: mol_type = genomic DNA
tgtaagaagcaagtctacaa

SEQ ID NO: 256 - DNA, 20 bp, Vigna unguiculata
  source 1..20: mol_type = genomic DNA
ctgtggaaggaaagagttca

SEQ ID NO: 257 - DNA, 20 bp, Vigna unguiculata
  source 1..20: mol_type = genomic DNA
ggccatgtggtaactgtgga

SEQ ID NO: 258 - DNA, 20 bp, Vigna unguiculata
  source 1..20: mol_type = genomic DNA
cctgggccatgtggtaactg

SEQ ID NO: 259 - DNA, 20 bp, Vigna unguiculata
  source 1..20: mol_type = genomic DNA
ttccttccacagttaccaca

SEQ ID NO: 260 - DNA, 20 bp, Vigna unguiculata
  source 1..20: mol_type = genomic DNA
aatctcaaccctgggccatg

SEQ ID NO: 261 - DNA, 20 bp, Vigna unguiculata
  source 1..20: mol_type = genomic DNA
ccacagttaccacatggccc

SEQ ID NO: 262 - DNA, 20 bp, Vigna unguiculata
  source 1..20: mol_type = genomic DNA
cacagttaccacatggccca

SEQ ID NO: 263 - DNA, 20 bp, Vigna unguiculata
  source 1..20: mol_type = genomic DNA
cctccaccaatctcaaccct

SEQ ID NO: 264 - DNA, 20 bp, Vigna unguiculata
  source 1..20: mol_type = genomic DNA
tcctccaccaatctcaaccc

SEQ ID NO: 265 - DNA, 20 bp, Vigna unguiculata
  source 1..20: mol_type = genomic DNA
acatggcccagggttgagat

SEQ ID NO: 266 - DNA, 20 bp, Vigna unguiculata
  source 1..20: mol_type = genomic DNA
tggcccagggttgagattgg

SEQ ID NO: 267 - DNA, 20 bp, Vigna unguiculata
  source 1..20: mol_type = genomic DNA
cccagggttgagattggtgg

SEQ ID NO: 268 - DNA, 20 bp, Vigna unguiculata
  source 1..20: mol_type = genomic DNA
tatatataccagtgtaaaga

SEQ ID NO: 269 - DNA, 20 bp, Vigna unguiculata
  source 1..20: mol_type = genomic DNA
tttgagatccttctttacac

SEQ ID NO: 270 - DNA, 20 bp, Vigna unguiculata
  source 1..20: mol_type = genomic DNA
ttttttgttcaataaataaa

SEQ ID NO: 271 - DNA, 20 bp, Vigna unguiculata
  source 1..20: mol_type = genomic DNA
tttcaaaacttcaatcatgt

SEQ ID NO: 272 - DNA, 20 bp, Vigna unguiculata
  source 1..20: mol_type = genomic DNA
catttatttcaaatgattga

SEQ ID NO: 273 - DNA, 20 bp, Vigna unguiculata
  source 1..20: mol_type = genomic DNA
cataatctgcaaagagaaaa

SEQ ID NO: 274 - DNA, 20 bp, Vigna unguiculata
  source 1..20: mol_type = genomic DNA
cactaggtcctgggacatca

SEQ ID NO: 275 - DNA, 20 bp, Vigna unguiculata
  source 1..20: mol_type = genomic DNA
tcactaggtcctgggacatc

SEQ ID NO: 276 - DNA, 20 bp, Vigna unguiculata
  source 1..20: mol_type = genomic DNA
atgacagaccctgatgtccc

SEQ ID NO: 277 - DNA, 20 bp, Vigna unguiculata
  source 1..20: mol_type = genomic DNA
gataagggtcactaggtcct

SEQ ID NO: 278 - DNA, 20 bp, Vigna unguiculata
  source 1..20: mol_type = genomic DNA
agataagggtcactaggtcc

SEQ ID NO: 279 - DNA, 20 bp, Vigna unguiculata
  source 1..20: mol_type = genomic DNA
tctctcagataagggtcact

SEQ ID NO: 280 - DNA, 20 bp, Vigna unguiculata
  source 1..20: mol_type = genomic DNA
gcagatgttctctcagataa

SEQ ID NO: 281 - DNA, 20 bp, Vigna unguiculata
  source 1..20: mol_type = genomic DNA
tgcagatgttctctcagata

SEQ ID NO: 282 - DNA, 20 bp, Vigna unguiculata
  source 1..20: mol_type = genomic DNA
atctgagagaacatctgcac

SEQ ID NO: 283 - DNA, 20 bp, Vigna unguiculata
  source 1..20: mol_type = genomic DNA
aaatacaaacggttaatttc

SEQ ID NO: 284 - DNA, 20 bp, Vigna unguiculata
  source 1..20: mol_type = genomic DNA
taaatgaagaaaaatacaaa

SEQ ID NO: 285 - DNA, 20 bp, Vigna unguiculata
  source 1..20: mol_type = genomic DNA
ttgtatttttcttcatttat

SEQ ID NO: 286 - DNA, 20 bp, Vigna unguiculata
  source 1..20: mol_type = genomic DNA
ttagaattggtttggttttc

SEQ ID NO: 287 - DNA, 20 bp, Vigna unguiculata
  source 1..20: mol_type = genomic DNA
ctctcagtttagaattggtt

SEQ ID NO: 288 - DNA, 20 bp, Vigna unguiculata
  source 1..20: mol_type = genomic DNA
tccttctctcagtttagaat

SEQ ID NO: 289 - DNA, 20 bp, Vigna unguiculata
  source 1..20: mol_type = genomic DNA
accaattctaaactgagaga

SEQ ID NO: 290 - DNA, 20 bp, Vigna unguiculata
  source 1..20: mol_type = genomic DNA
atcaattctatgcaccaaat

SEQ ID NO: 291 - DNA, 20 bp, Vigna unguiculata
  source 1..20: mol_type = genomic DNA
cccttcatggaaaaccaatt

SEQ ID NO: 292 - DNA, 20 bp, Vigna unguiculata
  source 1..20: mol_type = genomic DNA
accaaattggttttccatga

SEQ ID NO: 293 - DNA, 20 bp, Vigna unguiculata
  source 1..20: mol_type = genomic DNA
ccaaattggttttccatgaa

SEQ ID NO: 294 - DNA, 20 bp, Vigna unguiculata
  source 1..20: mol_type = genomic DNA
agaacttttataacccttca

SEQ ID NO: 295 - DNA, 20 bp, Vigna unguiculata
  source 1..20: mol_type = genomic DNA
acacagtaaaattaggtctt

SEQ ID NO: 296 - DNA, 20 bp, Vigna unguiculata
  source 1..20: mol_type = genomic DNA
tatccacacacagtaaaatt

SEQ ID NO: 297 - DNA, 20 bp, Vigna unguiculata
  source 1..20: mol_type = genomic DNA
agacctaattttactgtgtg

SEQ ID NO: 298 - DNA, 20 bp, Vigna unguiculata
  source 1..20: mol_type = genomic DNA
atcaaagcaaagaaattttc

SEQ ID NO: 299 - DNA, 20 bp, Vigna unguiculata
  source 1..20: mol_type = genomic DNA
ctgaaattgtgcccttttgc

SEQ ID NO: 300 - DNA, 20 bp, Vigna unguiculata
  source 1..20: mol_type = genomic DNA
tctgtcaccatcctgcaaaa

SEQ ID NO: 301 - DNA, 20 bp, Vigna unguiculata
  source 1..20: mol_type = genomic DNA
gtctgtcaccatcctgcaaa

SEQ ID NO: 302 - DNA, 20 bp, Vigna unguiculata
  source 1..20: mol_type = genomic DNA
aattgtgcccttttgcagga

SEQ ID NO: 303 - DNA, 20 bp, Vigna unguiculata
  source 1..20: mol_type = genomic DNA
aggatggtgacagacatacc

SEQ ID NO: 304 - DNA, 20 bp, Vigna unguiculata
  source 1..20: mol_type = genomic DNA
aatgaagcatttgttgtgcc

SEQ ID NO: 305 - DNA, 20 bp, Vigna unguiculata
  source 1..20: mol_type = genomic DNA
ggcacaacaaatgcttcatt

SEQ ID NO: 306 - DNA, 20 bp, Vigna unguiculata
  source 1..20: mol_type = genomic DNA
aaaagaacggaacaaaaaca

SEQ ID NO: 307 - DNA, 20 bp, Vigna unguiculata
  source 1..20: mol_type = genomic DNA
attccctaccccaaaaagaa

SEQ ID NO: 308 - DNA, 20 bp, Vigna unguiculata
  source 1..20: mol_type = genomic DNA
tgtttttgttccgttctttt

SEQ ID NO: 309 - DNA, 20 bp, Vigna unguiculata
  source 1..20: mol_type = genomic DNA
gtttttgttccgttcttttt

SEQ ID NO: 310 - DNA, 20 bp, Vigna unguiculata
  source 1..20: mol_type = genomic DNA
tttttgttccgttctttttg

SEQ ID NO: 311 - DNA, 20 bp, Vigna unguiculata
  source 1..20: mol_type = genomic DNA
tgttccgttctttttggggt

SEQ ID NO: 312 - DNA, 20 bp, Vigna unguiculata
  source 1..20: mol_type = genomic DNA
gttccgttctttttggggta

SEQ ID NO: 313 - DNA, 20 bp, Vigna unguiculata
  source 1..20: mol_type = genomic DNA
ttttggggtagggaatgtgt

SEQ ID NO: 314 - DNA, 20 bp, Vigna unguiculata
  source 1..20: mol_type = genomic DNA
tgtatccctatgttaggctt

SEQ ID NO: 315 - DNA, 20 bp, Vigna unguiculata
  source 1..20: mol_type = genomic DNA
gaaatgccaaagcctaacat

SEQ ID NO: 316 - DNA, 20 bp, Vigna unguiculata
  source 1..20: mol_type = genomic DNA
aaatgccaaagcctaacata

SEQ ID NO: 317 - DNA, 20 bp, Vigna unguiculata
  source 1..20: mol_type = genomic DNA
aacctgtgtatccctatgtt

SEQ ID NO: 318 - DNA, 20 bp, Vigna unguiculata
  source 1..20: mol_type = genomic DNA
agcctaacatagggatacac

SEQ ID NO: 319 - DNA, 20 bp, Vigna unguiculata
  source 1..20: mol_type = genomic DNA
gcctacgtttttgctggaac

SEQ ID NO: 320 - DNA, 20 bp, Vigna unguiculata
  source 1..20: mol_type = genomic DNA
cacactgcctacgtttttgc

SEQ ID NO: 321 - DNA, 20 bp, Vigna unguiculata
  source 1..20: mol_type = genomic DNA
tcctgttccagcaaaaacgt

SEQ ID NO: 322 - DNA, 20 bp, Vigna unguiculata
  source 1..20: mol_type = genomic DNA
aagttgtccctcgaagaagg

SEQ ID NO: 323 - DNA, 20 bp, Vigna unguiculata
  source 1..20: mol_type = genomic DNA
gtgttactccaccttcttcg

SEQ ID NO: 324 - DNA, 20 bp, Vigna unguiculata
  source 1..20: mol_type = genomic DNA
ttaaagttgtccctcgaaga

SEQ ID NO: 325 - DNA, 20 bp, Vigna unguiculata
  source 1..20: mol_type = genomic DNA
tgttactccaccttcttcga

SEQ ID NO: 326 - DNA, 20 bp, Vigna unguiculata
  source 1..20: mol_type = genomic DNA
agggagtccaaggtcgttct

SEQ ID NO: 327 - DNA, 20 bp, Vigna unguiculata
  source 1..20: mol_type = genomic DNA
ttttcatccgagaacgacct

SEQ ID NO: 328 - DNA, 20 bp, Vigna unguiculata
  source 1..20: mol_type = genomic DNA
cagcagcaacagggagtcca

SEQ ID NO: 329 - DNA, 20 bp, Vigna unguiculata
  source 1..20: mol_type = genomic DNA
tgaagtagacagcagcaaca

SEQ ID NO: 330 - DNA, 20 bp, Vigna unguiculata
  source 1..20: mol_type = genomic DNA
ttgaagtagacagcagcaac

SEQ ID NO: 331 - DNA, 20 bp, Vigna unguiculata
  source 1..20: mol_type = genomic DNA
ctgtctacttcaatgcacag

SEQ ID NO: 332 - DNA, 20 bp, Vigna unguiculata
  source 1..20: mol_type = genomic DNA
tgtctacttcaatgcacaga

SEQ ID NO: 333 - DNA, 20 bp, Vigna unguiculata
  source 1..20: mol_type = genomic DNA
ctagaagacgctaatatata

SEQ ID NO: 334 - DNA, 20 bp, Vigna unguiculata
  source 1..20: mol_type = genomic DNA
gataacgttattgagtacat

SEQ ID NO: 335 - DNA, 20 bp, Vigna unguiculata
  source 1..20: mol_type = genomic DNA
caataacgttatcttcacgt

SEQ ID NO: 336 - DNA, 20 bp, Vigna unguiculata
  source 1..20: mol_type = genomic DNA
aataacgttatcttcacgta

SEQ ID NO: 337 - DNA, 20 bp, Vigna unguiculata
  source 1..20: mol_type = genomic DNA
ataacgttatcttcacgtag

SEQ ID NO: 338 - DNA, 20 bp, Vigna unguiculata
  source 1..20: mol_type = genomic DNA
gatggtttagaagtgaaact

SEQ ID NO: 339 - DNA, 20 bp, Vigna unguiculata
  source 1..20: mol_type = genomic DNA
agctatttcaagcgacacga

SEQ ID NO: 340 - DNA, 1492 bp, Vigna unguiculata
  source 1..1492: mol_type = genomic DNA
catcatttctctctactctagcatgttcccttgacaattttgaagaacccaaattgcttacttaaacagtgtgttctttcccaaaatagataagcgtgtatggaatctctctttatgcttctaaaccaagccaagttcatggtttttatttcccttcataaacccttttggcgcctataaaatgccttcaaaatctcacttctcatgtgcccttcttcacaaagtttttcccttttcttagtttcattccaattcatgtctagggtcatggaaccactttctgtgggaagagtgataggagaagtggttgacattttcagcccaagtgtgagaatgaatgtgacatattccaccaaggaagttgctaatggtcatgagttaatgccttctactgttatggccaaaccacgcgtggagattggtggtgatgacatgagaactgcttataccttggtaaaatcatcactcattcaccccatctatgtgtttgatcatatgcctctattagtggtagttaactcagggtatttatgtgtcaaatggaacatttagatcatgacagacccagatgctccaagtcctagtgatccatatctaagggaacatcttcactggtttgtgtattatcaaactcaaactctccatgttttttttttcttctgtattctttgtactatatgaattccattattaacttggtgacaatttatcaggatggttacagatatccctggcaccacagatgtctcttttggttagtcactgtcttaccccacactgtgttgattcttattattattatcagtatttcttaatctaagggtaatgcttattataaaaagatgcgtgtaaaaaggacattttttgttaacaaaagggaactgttaaactggtaacaggaaaagagattatggggtatgagagtccaaaaccagtaataggaatccacagatatgtgttcatcttgttcaagcagagaggaagacaaacagtgagagctccttcttcaagagaccgtttcaacacaaggagattctcggaagagaatggccttggtctaccagttgctgcagtttacttcaatgctcaaagagaaactgctgcaaggagaaggtgatgactccagctccagaagaagaagaagaagaagaagaagaaaaaaagaaaagggtttcagttaataaagttattacttctttcaatctcaagtatctgagatttgtttctctggttttcttagggtttggcatggttgaataataaggttaggctgtgttttttatgaaatctcttcctctcttgagtttttctttttcaattttcttttggaggttggtggtgtttaaaaggtagtagatattcttgatgtactttgtacttatagcttttctaggttatgagaagttggggaccaaactatagtgttatgtttcttttaagaatctatgatttgttacaggaaagaacatagctttaccagagctgttactta

SEQ ID NO: 341 - protein, 189 aa, Vigna unguiculata
MCPSSQSFSLFLVSFQFMSRVMEPLSVGRVIGEVVDIFSPSVRMNVTYSTKEVANGHELMPSTVMAKPRVEIGGDDMRTAYTLIMTDPDAPSPSDPYLREHLHWMVTDIPGTTDVSFGKEIMGYESPKPVIGIHRYVFILFKQRGRQTVRAPSSRDRFNTRRFSEENGLGLPVAAVYFNAQRETAARRR

SEQ ID NO: 342 - DNA, 20 bp, Vigna unguiculata
  source 1..20: mol_type = genomic DNA
gggttcttcaaaattgtcaa

SEQ ID NO: 343 - DNA, 20 bp, Vigna unguiculata
  source 1..20: mol_type = genomic DNA
tgggttcttcaaaattgtca

SEQ ID NO: 344 - DNA, 20 bp, Vigna unguiculata
  source 1..20: mol_type = genomic DNA
actgtttaagtaagcaattt

SEQ ID NO: 345 - DNA, 20 bp, Vigna unguiculata
  source 1..20: mol_type = genomic DNA
cactgtttaagtaagcaatt

SEQ ID NO: 346 - DNA, 20 bp, Vigna unguiculata
  source 1..20: mol_type = genomic DNA
catacacgcttatctatttt

SEQ ID NO: 347 - DNA, 20 bp, Vigna unguiculata
  source 1..20: mol_type = genomic DNA
ccatacacgcttatctattt

SEQ ID NO: 348 - DNA, 20 bp, Vigna unguiculata
  source 1..20: mol_type = genomic DNA
ccaaaatagataagcgtgta

SEQ ID NO: 349 - DNA, 20 bp, Vigna unguiculata
  source 1..20: mol_type = genomic DNA
taaaaaccatgaacttggct

SEQ ID NO: 350 - DNA, 20 bp, Vigna unguiculata
  source 1..20: mol_type = genomic DNA
tctaaaccaagccaagttca

SEQ ID NO: 351 - DNA, 20 bp, Vigna unguiculata
  source 1..20: mol_type = genomic DNA
ggaaataaaaaccatgaact

SEQ ID NO: 352 - DNA, 20 bp, Vigna unguiculata
  source 1..20: mol_type = genomic DNA
gcgccaaaagggtttatgaa

SEQ ID NO: 353 - DNA, 20 bp, Vigna unguiculata
  source 1..20: mol_type = genomic DNA
ggcgccaaaagggtttatga

SEQ ID NO: 354 - DNA, 20 bp, Vigna unguiculata
  source 1..20: mol_type = genomic DNA
tttcccttcataaacccttt

SEQ ID NO: 355 - DNA, 20 bp, Vigna unguiculata
  source 1..20: mol_type = genomic DNA
gcattttataggcgccaaaa

SEQ ID NO: 356 - DNA, 20 bp, Vigna unguiculata
  source 1..20: mol_type = genomic DNA
ggcattttataggcgccaaa

SEQ ID NO: 357 - DNA, 20 bp, Vigna unguiculata
  source 1..20: mol_type = genomic DNA
agattttgaaggcattttat

SEQ ID NO: 358 - DNA, 20 bp, Vigna unguiculata
  source 1..20: mol_type = genomic DNA
catgagaagtgagattttga

SEQ ID NO: 359 - DNA, 20 bp, Vigna unguiculata
  source 1..20: mol_type = genomic DNA
gggaaaaactttgtgaagaa

SEQ ID NO: 360 - DNA, 20 bp, Vigna unguiculata
  source 1..20: mol_type = genomic DNA
agggaaaaactttgtgaaga

SEQ ID NO: 361 - DNA, 20 bp, Vigna unguiculata
  source 1..20: mol_type = genomic DNA
ttggaatgaaactaagaaaa

SEQ ID NO: 362 - DNA, 20 bp, Vigna unguiculata
  source 1..20: mol_type = genomic DNA
attggaatgaaactaagaaa

SEQ ID NO: 363 - DNA, 20 bp, Vigna unguiculata
  source 1..20: mol_type = genomic DNA
ccatgaccctagacatgaat

SEQ ID NO: 364 - DNA, 20 bp, Vigna unguiculata
  source 1..20: mol_type = genomic DNA
tttcattccaattcatgtct

SEQ ID NO: 365 - DNA, 20 bp, Vigna unguiculata
  source 1..20: mol_type = genomic DNA
ttcattccaattcatgtcta

SEQ ID NO: 366 - DNA, 20 bp, Vigna unguiculata
  source 1..20: mol_type = genomic DNA
ccaattcatgtctagggtca

SEQ ID NO: 367 - DNA, 20 bp, Vigna unguiculata
  source 1..20: mol_type = genomic DNA
atcactcttcccacagaaag

SEQ ID NO: 368 - DNA, 20 bp, Vigna unguiculata
  source 1..20: mol_type = genomic DNA
ggtcatggaaccactttctg

SEQ ID NO: 369 - DNA, 20 bp, Vigna unguiculata
  source 1..20: mol_type = genomic DNA
gtcatggaaccactttctgt

SEQ ID NO: 370 - DNA, 20 bp, Vigna unguiculata
  source 1..20: mol_type = genomic DNA
ctttctgtgggaagagtgat

SEQ ID NO: 371 - DNA, 20 bp, Vigna unguiculata
  source 1..20: mol_type = genomic DNA
gggaagagtgataggagaag

SEQ ID NO: 372 - DNA, 20 bp, Vigna unguiculata
  source 1..20: mol_type = genomic DNA
tcacattcattctcacactt

SEQ ID NO: 373 - DNA, 20 bp, Vigna unguiculata
  source 1..20: mol_type = genomic DNA
gtcacattcattctcacact

SEQ ID NO: 374 - DNA, 20 bp, Vigna unguiculata
  source 1..20: mol_type = genomic DNA
gaatgtgacatattccacca

SEQ ID NO: 375 - DNA, 20 bp, Vigna unguiculata
  source 1..20: mol_type = genomic DNA
accattagcaacttccttgg

SEQ ID NO: 376 - DNA, 20 bp, Vigna unguiculata
  source 1..20: mol_type = genomic DNA
atgaccattagcaacttcct

SEQ ID NO: 377 - DNA, 20 bp, Vigna unguiculata
  source 1..20: mol_type = genomic DNA
tccaccaaggaagttgctaa

SEQ ID NO: 378 - DNA, 20 bp, Vigna unguiculata
  source 1..20: mol_type = genomic DNA
ggtttggccataacagtaga

SEQ ID NO: 379 - DNA, 20 bp, Vigna unguiculata
  source 1..20: mol_type = genomic DNA
gttaatgccttctactgtta

SEQ ID NO: 380 - DNA, 20 bp, Vigna unguiculata
  source 1..20: mol_type = genomic DNA
accaatctccacgcgtggtt

SEQ ID NO: 381 - DNA, 20 bp, Vigna unguiculata
  source 1..20: mol_type = genomic DNA
tgttatggccaaaccacgcg

SEQ ID NO: 382 - DNA, 20 bp, Vigna unguiculata
  source 1..20: mol_type = genomic DNA
tcaccaccaatctccacgcg

SEQ ID NO: 383 - DNA, 20 bp, Vigna unguiculata
  source 1..20: mol_type = genomic DNA
gccaaaccacgcgtggagat

SEQ ID NO: 384 - DNA, 20 bp, Vigna unguiculata
  source 1..20: mol_type = genomic DNA
aaaccacgcgtggagattgg

SEQ ID NO: 385 - DNA, 20 bp, Vigna unguiculata
  source 1..20: mol_type = genomic DNA
catgagaactgcttatacct

SEQ ID NO: 386 - DNA, 20 bp, Vigna unguiculata
  source 1..20: mol_type = genomic DNA
aatgagtgatgattttacca

SEQ ID NO: 387 - DNA, 20 bp, Vigna unguiculata
  source 1..20: mol_type = genomic DNA
tatgatcaaacacatagatg

SEQ ID NO: 388 - DNA, 20 bp, Vigna unguiculata
  source 1..20: mol_type = genomic DNA
atatgatcaaacacatagat

SEQ ID NO: 389 - DNA, 20 bp, Vigna unguiculata
  source 1..20: mol_type = genomic DNA
catatgatcaaacacataga

SEQ ID NO: 390 - DNA, 20 bp, Vigna unguiculata
  source 1..20: mol_type = genomic DNA
gagttaactaccactaatag

SEQ ID NO: 391 - DNA, 20 bp, Vigna unguiculata
  source 1..20: mol_type = genomic DNA
tgatcatatgcctctattag

SEQ ID NO: 392 - DNA, 20 bp, Vigna unguiculata
  source 1..20: mol_type = genomic DNA
ctattagtggtagttaactc

SEQ ID NO: 393 - DNA, 20 bp, Vigna unguiculata
  source 1..20: mol_type = genomic DNA
tattagtggtagttaactca

SEQ ID NO: 394 - DNA, 20 bp, Vigna unguiculata
  source 1..20: mol_type = genomic DNA
cagggtatttatgtgtcaaa

SEQ ID NO: 395 - DNA, 20 bp, Vigna unguiculata
  source 1..20: mol_type = genomic DNA
cactaggacttggagcatct

SEQ ID NO: 396 - DNA, 20 bp, Vigna unguiculata
  source 1..20: mol_type = genomic DNA
tcactaggacttggagcatc

SEQ ID NO: 397 - DNA, 20 bp, Vigna unguiculata
  source 1..20: mol_type = genomic DNA
agatatggatcactaggact

SEQ ID NO: 398 - DNA, 20 bp, Vigna unguiculata
  source 1..20: mol_type = genomic DNA
tcccttagatatggatcact

SEQ ID NO: 399 - DNA, 20 bp, Vigna unguiculata
  source 1..20: mol_type = genomic DNA
gtcctagtgatccatatcta

SEQ ID NO: 400 - DNA, 20 bp, Vigna unguiculata
  source 1..20: mol_type = genomic DNA
tgaagatgttcccttagata

SEQ ID NO: 401 - DNA, 20 bp, Vigna unguiculata
  source 1..20: mol_type = genomic DNA
tcctagtgatccatatctaa

SEQ ID NO: 402 - DNA, 20 bp, Vigna unguiculata
  source 1..20: mol_type = genomic DNA
atctaagggaacatcttcac

SEQ ID NO: 403 - DNA, 20 bp, Vigna unguiculata
  source 1..20: mol_type = genomic DNA
tacagaagaaaaaaaaaaca

SEQ ID NO: 404 - DNA, 20 bp, Vigna unguiculata
  source 1..20: mol_type = genomic DNA
aattgtcaccaagttaataa

SEQ ID NO: 405 - DNA, 20 bp, Vigna unguiculata
  source 1..20: mol_type = genomic DNA
tatgaattccattattaact

SEQ ID NO: 406 - DNA, 20 bp, Vigna unguiculata
  source 1..20: mol_type = genomic DNA
taacttggtgacaatttatc

SEQ ID NO: 407 - DNA, 20 bp, Vigna unguiculata
  source 1..20: mol_type = genomic DNA
ttggtgacaatttatcagga

SEQ ID NO: 408 - DNA, 20 bp, Vigna unguiculata
  source 1..20: mol_type = genomic DNA
aggatggttacagatatccc

SEQ ID NO: 409 - DNA, 20 bp, Vigna unguiculata
  source 1..20: mol_type = genomic DNA
aagagacatctgtggtgcca

SEQ ID NO: 410 - DNA, 20 bp, Vigna unguiculata
  source 1..20: mol_type = genomic DNA
aaagagacatctgtggtgcc

SEQ ID NO: 411 - DNA, 20 bp, Vigna unguiculata
  source 1..20: mol_type = genomic DNA
ctaaccaaaagagacatctg

SEQ ID NO: 412 - DNA, 20 bp, Vigna unguiculata
  source 1..20: mol_type = genomic DNA
ggcaccacagatgtctcttt

SEQ ID NO: 413 - DNA, 20 bp, Vigna unguiculata
  source 1..20: mol_type = genomic DNA
ataagaatcaacacagtgtg

SEQ ID NO: 414 - DNA, 20 bp, Vigna unguiculata
  source 1..20: mol_type = genomic DNA
aataagaatcaacacagtgt

SEQ ID NO: 415 - DNA, 20 bp, Vigna unguiculata
  source 1..20: mol_type = genomic DNA
taataagaatcaacacagtg

SEQ ID NO: 416 - DNA, 20 bp, Vigna unguiculata
  source 1..20: mol_type = genomic DNA
tatcagtatttcttaatcta

SEQ ID NO: 417 - DNA, 20 bp, Vigna unguiculata
  source 1..20: mol_type = genomic DNA
atcagtatttcttaatctaa

SEQ ID NO: 418 - DNA, 20 bp, Vigna unguiculata
  source 1..20: mol_type = genomic DNA
ataaaaagatgcgtgtaaaa

SEQ ID NO: 419 - DNA, 20 bp, Vigna unguiculata
  source 1..20: mol_type = genomic DNA
ggacattttttgttaacaaa

SEQ ID NO: 420 - DNA, 20 bp, Vigna unguiculata
  source 1..20: mol_type = genomic DNA
gacattttttgttaacaaaa

SEQ ID NO: 421 - DNA, 20 bp, Vigna unguiculata
  source 1..20: mol_type = genomic DNA
acaaaagggaactgttaaac

SEQ ID NO: 422 - DNA, 20 bp, Vigna unguiculata
  source 1..20: mol_type = genomic DNA
ggaactgttaaactggtaac

SEQ ID NO: 423 - DNA, 20 bp, Vigna unguiculata
  source 1..20: mol_type = genomic DNA
ggtaacaggaaaagagatta

SEQ ID NO: 424 - DNA, 20 bp, Vigna unguiculata
  source 1..20: mol_type = genomic DNA
gtaacaggaaaagagattat

SEQ ID NO: 425 - DNA, 20 bp, Vigna unguiculata
  source 1..20: mol_type = genomic DNA
taacaggaaaagagattatg

SEQ ID NO: 426 - DNA, 20 bp, Vigna unguiculata
  source 1..20: mol_type = genomic DNA
tggattcctattactggttt

SEQ ID NO: 427 - DNA, 20 bp, Vigna unguiculata
  source 1..20: mol_type = genomic DNA
gagagtccaaaaccagtaat

SEQ ID NO: 428 - DNA, 20 bp, Vigna unguiculata
  source 1..20: mol_type = genomic DNA
tatctgtggattcctattac

SEQ ID NO: 429 - DNA, 20 bp, Vigna unguiculata
  source 1..20: mol_type = genomic DNA
acaagatgaacacatatctg

SEQ ID NO: 430 - DNA, 20 bp, Vigna unguiculata
  source 1..20: mol_type = genomic DNA
ttcatcttgttcaagcagag

SEQ ID NO: 431 - DNA, 20 bp, Vigna unguiculata
  source 1..20: mol_type = genomic DNA
ttgaaacggtctcttgaaga

SEQ ID NO: 432 - DNA, 20 bp, Vigna unguiculata
  source 1..20: mol_type = genomic DNA
agaatctccttgtgttgaaa

SEQ ID NO: 433 - DNA, 20 bp, Vigna unguiculata
  source 1..20: mol_type = genomic DNA
caagagaccgtttcaacaca

SEQ ID NO: 434 - DNA, 20 bp, Vigna unguiculata
  source 1..20: mol_type = genomic DNA
tttcaacacaaggagattct

SEQ ID NO: 435 - DNA, 20 bp, Vigna unguiculata
  source 1..20: mol_type = genomic DNA
aggagattctcggaagagaa

SEQ ID NO: 436 - DNA, 20 bp, Vigna unguiculata
  source 1..20: mol_type = genomic DNA
ttctcggaagagaatggcct

SEQ ID NO: 437 - DNA, 20 bp, Vigna unguiculata
  source 1..20: mol_type = genomic DNA
ctgcagcaactggtagacca

SEQ ID NO: 438 - DNA, 20 bp, Vigna unguiculata
  source 1..20: mol_type = genomic DNA
ttgaagtaaactgcagcaac

SEQ ID NO: 439 - DNA, 20 bp, Vigna unguiculata
  source 1..20: mol_type = genomic DNA
ctcaaagagaaactgctgca

SEQ ID NO: 440 - DNA, 20 bp, Vigna unguiculata
  source 1..20: mol_type = genomic DNA
gagaaactgctgcaaggaga

SEQ ID NO: 441 - DNA, 20 bp, Vigna unguiculata
  source 1..20: mol_type = genomic DNA
tcttcttcttcttctggagc

SEQ ID NO: 442 - DNA, 20 bp, Vigna unguiculata
  source 1..20: mol_type = genomic DNA
tcttcttcttcttcttcttc

SEQ ID NO: 443 - DNA, 20 bp, Vigna unguiculata
  source 1..20: mol_type = genomic DNA
aagaagaagaaaaaaagaaa

SEQ ID NO: 444 - DNA, 20 bp, Vigna unguiculata
  source 1..20: mol_type = genomic DNA
agaagaagaaaaaaagaaaa

SEQ ID NO: 445 - DNA, 20 bp, Vigna unguiculata
  source 1..20: mol_type = genomic DNA
gtatctgagatttgtttctc

SEQ ID NO: 446 - DNA, 20 bp, Vigna unguiculata
  source 1..20: mol_type = genomic DNA
tttgtttctctggttttctt

SEQ ID NO: 447 - DNA, 20 bp, Vigna unguiculata
  source 1..20: mol_type = genomic DNA
ttgtttctctggttttctta

SEQ ID NO: 448 - DNA, 20 bp, Vigna unguiculata
  source 1..20: mol_type = genomic DNA
tctctggttttcttagggtt

SEQ ID NO: 449 - DNA, 20 bp, Vigna unguiculata
  source 1..20: mol_type = genomic DNA
ggttttcttagggtttggca

SEQ ID NO: 450 - DNA, 20 bp, Vigna unguiculata
  source 1..20: mol_type = genomic DNA
tttggcatggttgaataata

SEQ ID NO: 451 - DNA, 20 bp, Vigna unguiculata
  source 1..20: mol_type = genomic DNA
catggttgaataataaggtt

SEQ ID NO: 452 - DNA, 20 bp, Vigna unguiculata
  source 1..20: mol_type = genomic DNA
gaaaaagaaaaactcaagag

SEQ ID NO: 453 - DNA, 20 bp, Vigna unguiculata
  source 1..20: mol_type = genomic DNA
tttctttttcaattttcttt

SEQ ID NO: 454 - DNA, 20 bp, Vigna unguiculata
  source 1..20: mol_type = genomic DNA
ctttttcaattttcttttgg

SEQ ID NO: 455 - DNA, 20 bp, Vigna unguiculata
  source 1..20: mol_type = genomic DNA
ttcaattttcttttggaggt

SEQ ID NO: 456 - DNA, 20 bp, Vigna unguiculata
  source 1..20: mol_type = genomic DNA
aattttcttttggaggttgg

SEQ ID NO: 457 - DNA, 20 bp, Vigna unguiculata
  source 1..20: mol_type = genomic DNA
ggaggttggtggtgtttaaa

SEQ ID NO: 458 - DNA, 20 bp, Vigna unguiculata
  source 1..20: mol_type = genomic DNA
tttgtacttatagcttttct

SEQ ID NO: 459 - DNA, 20 bp, Vigna unguiculata
  source 1..20: mol_type = genomic DNA
ttttctaggttatgagaagt

SEQ ID NO: 460 - DNA, 20 bp, Vigna unguiculata
  source 1..20: mol_type = genomic DNA
tttctaggttatgagaagtt

SEQ ID NO: 461 - DNA, 20 bp, Vigna unguiculata
  source 1..20: mol_type = genomic DNA
ttctaggttatgagaagttg

SEQ ID NO: 462 - DNA, 20 bp, Vigna unguiculata
  source 1..20: mol_type = genomic DNA
agaaacataacactatagtt

SEQ ID NO: 463 - DNA, 20 bp, Vigna unguiculata
  source 1..20: mol_type = genomic DNA
aagaatctatgatttgttac

SEQ ID NO: 464 - DNA, 2721 bp, Vigna unguiculata
  source 1..2721: mol_type = genomic DNA
accattgtgggtgtagtacaatgtgtgtgaaccaaaggcatattgtgtttagcagtgagttagagttagccatgcctactactagcagaaatcctcttgtggttgggcgtgttataggggaggtaatagaacactttgaaagttccattccttttagggtctcctatggcaatagagaggtcaacaatggttgtgagcttaaaccttcccaagttgtgaacaaacccagagtgagtgttggtggagatgatctcaggaacttctatactctggtaattcattgcattactttcttcttatagggtttggttacacacaacctaaaagtgtttaccaaaacctctttactaaaagtaccaaaccctttttcattaaggttttcagaaacacttccagatatttatatatatcacttaaaatctgttcaatttttttctgttaaaggtgttagtagatcctgatgctcccagccctagtaaccctaatttcagggagtaccttcattggtgagtaaacaagacatatcatgtttttctagcatgacattagtaacatatcattgtactaacattctttttctcgatggattttgtgtaggttggtgactgatattcccgcaactaccggggctagtttcggtgtgtaatagttaacttgaaaaaactaaaatataaaacctctattaacaattaattagacaattttaaaaagaataagaaaaaattgtggttaaaaatatgcaagttctgttttactgactcatcaaatgtaatgtctaatgtgaatttaacccactctaacgtattcctaaaatattcatatgcaaaactataatgtgcttaatttgataaatttatggattcctgagttttaagttttgaattacgtgggattttccagatttaacttataattcctagaaagttaaattgatattaagaattaggattgtctttattagtctaacttattatctctaaccaaaaaatataatctgtcagtataaatattatgaatgcattaagattatttatattaatagtttatatattgataattcatattaactatctgtgctaatggaattgtcagttagcatgatttatcatgcgtttagactttgtgtgttagtcaaagattatagtaaaatcgactgacccaatgccatagtagtataaaataactttttttatactgaaatgagttattttcattttaactcatctggtacttaatgtataattattacttctaatcatgcctaaaagttagcgtacttacaaatacaagaatcgtctggattgtctagattcttgtaagccttttattttttttcttttgaaccttttttctgtgttaaagtctctttatactttttcaatatatatatatatatatatatatatatatataactaaagctttagtttagaagataacagtccaagcaaacatatataaaacgaatagaaaatgtaagtgcatgtaaaattagttacttatgtgatatctttaaaatctagttcacgctagttctatcataggtttaattcatttatttgatatgtttttaattatcaaaaggtataaaaaataatccaacaattctacaattcatgtcagtgacgttatcaattattatttcatttcagcaagaatacaaaaataaaaatagtttgagaatattttgtgatttcgttgttttatgtttcttgcagctacatcactgtgtttgttgatacaaaattttaacaaaaatagttataacatgaatgtataaaagccaataaactcaacattttgtatctgctatagcattgcgatcttctagtttgtcgacaagtatgcataactataattagattttgggacctatatatcacatcatgcggaacattgtgtcgtttagaatttaaagggcttgtcgtgcaggaaagaaaaaggagtataaaagtattggaatcatttatgtggaccatgtttctttatatatacttgaagtacaaaaatggtgtgtgtgatgcacaatatcatcacatggaagaaattgaaattgattccacgaggcatcaaattctaaattgtgtatgatgagacaaatgacaccagctaccaaaaggataaaaaggaaatatcatgggaaatatctaaggcccaaaaatactgaattatgataatctaatatcaatatcaatatcaatgaactggtataagagatgtgtatgagtggttcaattataacatgctaactggggtttttgcatgatttgatcgtaggtaacgaggttgtaagttatgaaagtccacgaccaacgatggggattcatcgtttggtgtttgtgttgttccgtcaacagtatcgacagagggtgtatgctcctggatggcgacagaatttcaacaccagagaatttgctgaactttacaatcttggtttgccagttgctgcagtgttcttcaactgtcagagggaaactggttctggtggtaggacattttgaaagttactttgtaccaaaaccgcacatgttttagttaatgaaagcacctaaaataaagaaacctacgtaatatatatgtaacaacaataataacacacatcgagtaataggaatatgtaaccaaaaatacatgtactactttatgtttttatatatatataaaaatgaaatttgactagttgatcaaatataatgaaggcactaagaataacagtgaggca

SEQ ID NO: 465 - protein, 193 aa, Vigna unguiculata
MCVNQRHIVFSSELELAMPTTSRNPLVVGRVIGEVIEHFESSIPFRVSYGNREVNNGCELKPSQVVNKPRVSVGGDDLRNFYTLVLVDPDAPSPSNPNFREYLHWLVTDIPATTGASFGNEVVSYESPRPTMGIHRLVFVLFRQQYRQRVYAPGWRQNFNTREFAELYNLGLPVAAVFFNCQRETGSGGRTFV

SEQ ID NO: 466 - DNA, 20 bp, Vigna unguiculata
  source 1..20: mol_type = genomic DNA
acattgtactacacccacaa

SEQ ID NO: 467 - DNA, 20 bp, Vigna unguiculata
  source 1..20: mol_type = genomic DNA
gtacaatgtgtgtgaaccaa

SEQ ID NO: 468 - DNA, 20 bp, Vigna unguiculata
  source 1..20: mol_type = genomic DNA
tgctaaacacaatatgcctt

SEQ ID NO: 469 - DNA, 20 bp, Vigna unguiculata
  source 1..20: mol_type = genomic DNA
atttctgctagtagtaggca

SEQ ID NO: 470 - DNA, 20 bp, Vigna unguiculata
  source 1..20: mol_type = genomic DNA
agaggatttctgctagtagt

SEQ ID NO: 471 - DNA, 20 bp, Vigna unguiculata
  source 1..20: mol_type = genomic DNA
tactagcagaaatcctcttg

SEQ ID NO: 472 - DNA, 20 bp, Vigna unguiculata
  source 1..20: mol_type = genomic DNA
ataacacgcccaaccacaag

SEQ ID NO: 473 - DNA, 20 bp, Vigna unguiculata
  source 1..20: mol_type = genomic DNA
agcagaaatcctcttgtggt

SEQ ID NO: 474 - DNA, 20 bp, Vigna unguiculata
  source 1..20: mol_type = genomic DNA
gcagaaatcctcttgtggtt

SEQ ID NO: 475 - DNA, 20 bp, Vigna unguiculata
  source 1..20: mol_type = genomic DNA
cttgtggttgggcgtgttat

SEQ ID NO: 476 - DNA, 20 bp, Vigna unguiculata
  source 1..20: mol_type = genomic DNA
ttgtggttgggcgtgttata

SEQ ID NO: 477 - DNA, 20 bp, Vigna unguiculata
  source 1..20: mol_type = genomic DNA
tgtggttgggcgtgttatag

SEQ ID NO: 478 - DNA, 20 bp, Vigna unguiculata
  source 1..20: mol_type = genomic DNA
ggttgggcgtgttatagggg

SEQ ID NO: 479 - DNA, 20 bp, Vigna unguiculata
  source 1..20: mol_type = genomic DNA
ataggagaccctaaaaggaa

SEQ ID NO: 480 - DNA, 20 bp, Vigna unguiculata
  source 1..20: mol_type = genomic DNA
ttgaaagttccattcctttt

SEQ ID NO: 481 - DNA, 20 bp, Vigna unguiculata
  source 1..20: mol_type = genomic DNA
tgaaagttccattcctttta

SEQ ID NO: 482 - DNA, 20 bp, Vigna unguiculata
  source 1..20: mol_type = genomic DNA
ttgccataggagaccctaaa

SEQ ID NO: 483 - DNA, 20 bp, Vigna unguiculata
  source 1..20: mol_type = genomic DNA
attccttttagggtctccta

SEQ ID NO: 484 - DNA, 20 bp, Vigna unguiculata
  source 1..20: mol_type = genomic DNA
gttgacctctctattgccat

SEQ ID NO: 485 - DNA, 20 bp, Vigna unguiculata
  source 1..20: mol_type = genomic DNA
ggtctcctatggcaatagag

SEQ ID NO: 486 - DNA, 20 bp, Vigna unguiculata
  source 1..20: mol_type = genomic DNA
ggcaatagagaggtcaacaa

SEQ ID NO: 487 - DNA, 20 bp, Vigna unguiculata
  source 1..20: mol_type = genomic DNA
ggtttgttcacaacttggga

SEQ ID NO: 488 - DNA, 20 bp, Vigna unguiculata
  source 1..20: mol_type = genomic DNA
tctgggtttgttcacaactt

SEQ ID NO: 489 - DNA, 20 bp, Vigna unguiculata
  source 1..20: mol_type = genomic DNA
ctctgggtttgttcacaact

SEQ ID NO: 490 - DNA, 20 bp, Vigna unguiculata
  source 1..20: mol_type = genomic DNA
tctccaccaacactcactct

SEQ ID NO: 491 - DNA, 20 bp, Vigna unguiculata
  source 1..20: mol_type = genomic DNA
atctccaccaacactcactc

SEQ ID NO: 492 - DNA, 20 bp, Vigna unguiculata
  source 1..20: mol_type = genomic DNA
aacaaacccagagtgagtgt

SEQ ID NO: 493 - DNA, 20 bp, Vigna unguiculata
  source 1..20: mol_type = genomic DNA
aaacccagagtgagtgttgg

SEQ ID NO: 494 - DNA, 20 bp, Vigna unguiculata
  source 1..20: mol_type = genomic DNA
gtgttggtggagatgatctc

SEQ ID NO: 495 - DNA, 20 bp, Vigna unguiculata
  source 1..20: mol_type = genomic DNA
tctcaggaacttctatactc

SEQ ID NO: 496 - DNA, 20 bp, Vigna unguiculata
  source 1..20: mol_type = genomic DNA
ttgcattactttcttcttat

SEQ ID NO: 497 - DNA, 20 bp, Vigna unguiculata
  source 1..20: mol_type = genomic DNA
tgcattactttcttcttata

SEQ ID NO: 498 - DNA, 20 bp, Vigna unguiculata
  source 1..20: mol_type = genomic DNA
tactttcttcttatagggtt

SEQ ID NO: 499 - DNA, 20 bp, Vigna unguiculata
  source 1..20: mol_type = genomic DNA
aggttttggtaaacactttt

SEQ ID NO: 500 - DNA, 20 bp, Vigna unguiculata
  source 1..20: mol_type = genomic DNA
tacttttagtaaagaggttt

SEQ ID NO: 501 - DNA, 20 bp, Vigna unguiculata
  source 1..20: mol_type = genomic DNA
gtttggtacttttagtaaag

SEQ ID NO: 502 - DNA, 20 bp, Vigna unguiculata
  source 1..20: mol_type = genomic DNA
aaccttaatgaaaaagggtt

SEQ ID NO: 503 - DNA, 20 bp, Vigna unguiculata
  source 1..20: mol_type = genomic DNA
ctgaaaaccttaatgaaaaa

SEQ ID NO: 504 - DNA, 20 bp, Vigna unguiculata
  source 1..20: mol_type = genomic DNA
tctgaaaaccttaatgaaaa

SEQ ID NO: 505 - DNA, 20 bp, Vigna unguiculata
  source 1..20: mol_type = genomic DNA
taccaaaccctttttcatta

SEQ ID NO: 506 - DNA, 20 bp, Vigna unguiculata
  source 1..20: mol_type = genomic DNA
aagtgatatatataaatatc

SEQ ID NO: 507 - DNA, 20 bp, Vigna unguiculata
  source 1..20: mol_type = genomic DNA
gttcaatttttttctgttaa

SEQ ID NO: 508 - DNA, 20 bp, Vigna unguiculata
  source 1..20: mol_type = genomic DNA
ttactagggctgggagcatc

SEQ ID NO: 509 - DNA, 20 bp, Vigna unguiculata
  source 1..20: mol_type = genomic DNA
aaattagggttactagggct

SEQ ID NO: 510 - DNA, 20 bp, Vigna unguiculata
  source 1..20: mol_type = genomic DNA
gaaattagggttactagggc

SEQ ID NO: 511 - DNA, 20 bp, Vigna unguiculata
  source 1..20: mol_type = genomic DNA
ccctgaaattagggttacta

SEQ ID NO: 512 - DNA, 20 bp, Vigna unguiculata
  source 1..20: mol_type = genomic DNA
tccctgaaattagggttact

SEQ ID NO: 513 - DNA, 20 bp, Vigna unguiculata
  source 1..20: mol_type = genomic DNA
gaaggtactccctgaaatta

SEQ ID NO: 514 - DNA, 20 bp, Vigna unguiculata
  source 1..20: mol_type = genomic DNA
gccctagtaaccctaatttc

SEQ ID NO: 515 - DNA, 20 bp, Vigna unguiculata
  source 1..20: mol_type = genomic DNA
tgaaggtactccctgaaatt

SEQ ID NO: 516 - DNA, 20 bp, Vigna unguiculata
  source 1..20: mol_type = genomic DNA
ccctagtaaccctaatttca

SEQ ID NO: 517 - DNA, 20 bp, Vigna unguiculata
  source 1..20: mol_type = genomic DNA
atttcagggagtaccttcat

SEQ ID NO: 518 - DNA, 20 bp, Vigna unguiculata
  source 1..20: mol_type = genomic DNA
tcttgtttactcaccaatga

SEQ ID NO: 519 - DNA, 20 bp, Vigna unguiculata
  source 1..20: mol_type = genomic DNA
actaacattctttttctcga

SEQ ID NO: 520 - DNA, 20 bp, Vigna unguiculata
  source 1..20: mol_type = genomic DNA
tttctcgatggattttgtgt

SEQ ID NO: 521 - DNA, 20 bp, Vigna unguiculata
  source 1..20: mol_type = genomic DNA
tcgatggattttgtgtaggt

SEQ ID NO: 522 - DNA, 20 bp, Vigna unguiculata
  source 1..20: mol_type = genomic DNA
aaactagccccggtagttgc

SEQ ID NO: 523 - DNA, 20 bp, Vigna unguiculata
  source 1..20: mol_type = genomic DNA
gaaactagccccggtagttg

SEQ ID NO: 524 - DNA, 20 bp, Vigna unguiculata
  source 1..20: mol_type = genomic DNA
actgatattcccgcaactac

SEQ ID NO: 525 - DNA, 20 bp, Vigna unguiculata
  source 1..20: mol_type = genomic DNA
ctgatattcccgcaactacc

SEQ ID NO: 526 - DNA, 20 bp, Vigna unguiculata
  source 1..20: mol_type = genomic DNA
tgatattcccgcaactaccg

SEQ ID NO: 527 - DNA, 20 bp, Vigna unguiculata
  source 1..20: mol_type = genomic DNA
ttacacaccgaaactagccc

SEQ ID NO: 528 - DNA, 20 bp, Vigna unguiculata
  source 1..20: mol_type = genomic DNA
gcaactaccggggctagttt

SEQ ID NO: 529 - DNA, 20 bp, Vigna unguiculata
  source 1..20: mol_type = genomic DNA
gtctaattaattgttaatag

SEQ ID NO: 530 - DNA, 20 bp, Vigna unguiculata
  source 1..20: mol_type = genomic DNA
aaaagaataagaaaaaattg

SEQ ID NO: 531 - DNA, 20 bp, Vigna unguiculata
  source 1..20: mol_type = genomic DNA
ttttaggaatacgttagagt

SEQ ID NO: 532 - DNA, 20 bp, Vigna unguiculata
  source 1..20: mol_type = genomic DNA
attttaggaatacgttagag

SEQ ID NO: 533 - DNA, 20 bp, Vigna unguiculata
  source 1..20: mol_type = genomic DNA
gttttgcatatgaatatttt

SEQ ID NO: 534 - DNA, 20 bp, Vigna unguiculata
  source 1..20: mol_type = genomic DNA
tgcttaatttgataaattta

SEQ ID NO: 535 - DNA, 20 bp, Vigna unguiculata
  source 1..20: mol_type = genomic DNA
taattcaaaacttaaaactc

SEQ ID NO: 536 - DNA, 20 bp, Vigna unguiculata
  source 1..20: mol_type = genomic DNA
gttttaagttttgaattacg

SEQ ID NO: 537 - DNA, 20 bp, Vigna unguiculata
  source 1..20: mol_type = genomic DNA
ttttaagttttgaattacgt

SEQ ID NO: 538 - DNA, 20 bp, Vigna unguiculata
  source 1..20: mol_type = genomic DNA
taggaattataagttaaatc

SEQ ID NO: 539 - DNA, 20 bp, Vigna unguiculata
  source 1..20: mol_type = genomic DNA
taatatcaatttaactttct

SEQ ID NO: 540 - DNA, 20 bp, Vigna unguiculata
  source 1..20: mol_type = genomic DNA
ttaaattgatattaagaatt

SEQ ID NO: 541 - DNA, 20 bp, Vigna unguiculata
  source 1..20: mol_type = genomic DNA
tactgacagattatattttt

SEQ ID NO: 542 - DNA, 20 bp, Vigna unguiculata
  source 1..20: mol_type = genomic DNA
atattaactatctgtgctaa

SEQ ID NO: 543 - DNA, 20 bp, Vigna unguiculata
  source 1..20: mol_type = genomic DNA
ttttatactactatggcatt

SEQ ID NO: 544 - DNA, 20 bp, Vigna unguiculata
  source 1..20: mol_type = genomic DNA
attttatactactatggcat

SEQ ID NO: 545 - DNA, 20 bp, Vigna unguiculata
  source 1..20: mol_type = genomic DNA
aaagttattttatactacta

SEQ ID NO: 546 - DNA, 20 bp, Vigna unguiculata
  source 1..20: mol_type = genomic DNA
tattttcattttaactcatc

SEQ ID NO: 547 - DNA, 20 bp, Vigna unguiculata
  source 1..20: mol_type = genomic DNA
ttgtaagtacgctaactttt

SEQ ID NO: 548 - DNA, 20 bp, Vigna unguiculata
  source 1..20: mol_type = genomic DNA
ttacaaatacaagaatcgtc

SEQ ID NO: 549 - DNA, 20 bp, Vigna unguiculata
  source 1..20: mol_type = genomic DNA
ttcaaaagaaaaaaaataaa

SEQ ID NO: 550 - DNA, 20 bp, Vigna unguiculata
  source 1..20: mol_type = genomic DNA
gagactttaacacagaaaaa

SEQ ID NO: 551 - DNA, 20 bp, Vigna unguiculata
  source 1..20: mol_type = genomic DNA
tcgttttatatatgtttgct

SEQ ID NO: 552 - DNA, 20 bp, Vigna unguiculata
  source 1..20: mol_type = genomic DNA
gttcacgctagttctatcat

SEQ ID NO: 553 - DNA, 20 bp, Vigna unguiculata
  source 1..20: mol_type = genomic DNA
atatgtttttaattatcaaa

SEQ ID NO: 554 - DNA, 20 bp, Vigna unguiculata
  source 1..20: mol_type = genomic DNA
gacatgaattgtagaattgt

SEQ ID NO: 555 - DNA, 20 bp, Vigna unguiculata
  source 1..20: mol_type = genomic DNA
atacaaaatgttgagtttat

SEQ ID NO: 556 - DNA, 20 bp, Vigna unguiculata
  source 1..20: mol_type = genomic DNA
gcataactataattagattt

SEQ ID NO: 557 - DNA, 20 bp, Vigna unguiculata
  source 1..20: mol_type = genomic DNA
cataactataattagatttt

SEQ ID NO: 558 - DNA, 20 bp, Vigna unguiculata
  source 1..20: mol_type = genomic DNA
ttccgcatgatgtgatatat

SEQ ID NO: 559 - DNA, 20 bp, Vigna unguiculata
  source 1..20: mol_type = genomic DNA
gacctatatatcacatcatg

SEQ ID NO: 560 - DNA, 20 bp, Vigna unguiculata
  source 1..20: mol_type = genomic DNA
ttgtgtcgtttagaatttaa

SEQ ID NO: 561 - DNA, 20 bp, Vigna unguiculata
  source 1..20: mol_type = genomic DNA
tgtgtcgtttagaatttaaa

SEQ ID NO: 562 - DNA, 20 bp, Vigna unguiculata
  source 1..20: mol_type = genomic DNA
atttaaagggcttgtcgtgc

SEQ ID NO: 563 - DNA, 20 bp, Vigna unguiculata
  source 1..20: mol_type = genomic DNA
ttgtcgtgcaggaaagaaaa

SEQ ID NO: 564 - DNA, 20 bp, Vigna unguiculata
  source 1..20: mol_type = genomic DNA
aaaaaggagtataaaagtat

SEQ ID NO: 565 - DNA, 20 bp, Vigna unguiculata
  source 1..20: mol_type = genomic DNA
aagtattggaatcatttatg

SEQ ID NO: 566 - DNA, 20 bp, Vigna unguiculata
  source 1..20: mol_type = genomic DNA
caagtatatataaagaaaca

SEQ ID NO: 567 - DNA, 20 bp, Vigna unguiculata
  source 1..20: mol_type = genomic DNA
atatacttgaagtacaaaaa

SEQ ID NO: 568 - DNA, 20 bp, Vigna unguiculata
  source 1..20: mol_type = genomic DNA
tgatgcacaatatcatcaca

SEQ ID NO: 569 - DNA, 20 bp, Vigna unguiculata
  source 1..20: mol_type = genomic DNA
aaattgaaattgattccacg

SEQ ID NO: 570 - DNA, 20 bp, Vigna unguiculata
  source 1..20: mol_type = genomic DNA
atttagaatttgatgcctcg

SEQ ID NO: 571 - DNA, 20 bp, Vigna unguiculata
  source 1..20: mol_type = genomic DNA
ctttttatccttttggtagc

SEQ ID NO: 572 - DNA, 20 bp, Vigna unguiculata
  source 1..20: mol_type = genomic DNA
aaatgacaccagctaccaaa

SEQ ID NO: 573 - DNA, 20 bp, Vigna unguiculata
  source 1..20: mol_type = genomic DNA
atatttcctttttatccttt

SEQ ID NO: 574 - DNA, 20 bp, Vigna unguiculata
  source 1..20: mol_type = genomic DNA
cagctaccaaaaggataaaa

SEQ ID NO: 575 - DNA, 20 bp, Vigna unguiculata
  source 1..20: mol_type = genomic DNA
aggataaaaaggaaatatca

SEQ ID NO: 576 - DNA, 20 bp, Vigna unguiculata
  source 1..20: mol_type = genomic DNA
ggataaaaaggaaatatcat

SEQ ID NO: 577 - DNA, 20 bp, Vigna unguiculata
  source 1..20: mol_type = genomic DNA
aatatcatgggaaatatcta

SEQ ID NO: 578 - DNA, 20 bp, Vigna unguiculata
  source 1..20: mol_type = genomic DNA
tatcataattcagtattttt

SEQ ID NO: 579 - DNA, 20 bp, Vigna unguiculata
  source 1..20: mol_type = genomic DNA
ttatcataattcagtatttt

SEQ ID NO: 580 - DNA, 20 bp, Vigna unguiculata
  source 1..20: mol_type = genomic DNA
caatatcaatatcaatgaac

SEQ ID NO: 581 - DNA, 20 bp, Vigna unguiculata
  source 1..20: mol_type = genomic DNA
gtataagagatgtgtatgag

SEQ ID NO: 582 - DNA, 20 bp, Vigna unguiculata
  source 1..20: mol_type = genomic DNA
ttcaattataacatgctaac

SEQ ID NO: 583 - DNA, 20 bp, Vigna unguiculata
  source 1..20: mol_type = genomic DNA
tcaattataacatgctaact

SEQ ID NO: 584 - DNA, 20 bp, Vigna unguiculata
  source 1..20: mol_type = genomic DNA
caattataacatgctaactg

SEQ ID NO: 585 - DNA, 20 bp, Vigna unguiculata
  source 1..20: mol_type = genomic DNA
tttttgcatgatttgatcgt

SEQ ID NO: 586 - DNA, 20 bp, Vigna unguiculata
  source 1..20: mol_type = genomic DNA
tgatttgatcgtaggtaacg

SEQ ID NO: 587 - DNA, 20 bp, Vigna unguiculata
  source 1..20: mol_type = genomic DNA
tgaatccccatcgttggtcg

SEQ ID NO: 588 - DNA, 20 bp, Vigna unguiculata
  source 1..20: mol_type = genomic DNA
tgaaagtccacgaccaacga

SEQ ID NO: 589 - DNA, 20 bp, Vigna unguiculata
  source 1..20: mol_type = genomic DNA
gaaagtccacgaccaacgat

SEQ ID NO: 590 - DNA, 20 bp, Vigna unguiculata
  source 1..20: mol_type = genomic DNA
aaagtccacgaccaacgatg

SEQ ID NO: 591 - DNA, 20 bp, Vigna unguiculata
  source 1..20: mol_type = genomic DNA
aaacgatgaatccccatcgt

SEQ ID NO: 592 - DNA, 20 bp, Vigna unguiculata
  source 1..20: mol_type = genomic DNA
aacgatggggattcatcgtt

SEQ ID NO: 593 - DNA, 20 bp, Vigna unguiculata
  source 1..20: mol_type = genomic DNA
ccctctgtcgatactgttga

SEQ ID NO: 594 - DNA, 20 bp, Vigna unguiculata
  source 1..20: mol_type = genomic DNA
tccgtcaacagtatcgacag

SEQ ID NO: 595 - DNA, 20 bp, Vigna unguiculata
  source 1..20: mol_type = genomic DNA
ccgtcaacagtatcgacaga

SEQ ID NO: 596 - DNA, 20 bp, Vigna unguiculata
  source 1..20: mol_type = genomic DNA
cgacagagggtgtatgctcc

SEQ ID NO: 597 - DNA, 20 bp, Vigna unguiculata
  source 1..20: mol_type = genomic DNA
agagggtgtatgctcctgga

SEQ ID NO: 598 - DNA, 20 bp, Vigna unguiculata
  source 1..20: mol_type = genomic DNA
ttgaaattctgtcgccatcc

SEQ ID NO: 599 - DNA, 20 bp, Vigna unguiculata
  source 1..20: mol_type = genomic DNA
gtaaagttcagcaaattctc

SEQ ID NO: 600 - DNA, 20 bp, Vigna unguiculata
  source 1..20: mol_type = genomic DNA
tttgctgaactttacaatct

SEQ ID NO: 601 - DNA, 20 bp, Vigna unguiculata
  source 1..20: mol_type = genomic DNA
ttgaagaacactgcagcaac

SEQ ID NO: 602 - DNA, 20 bp, Vigna unguiculata
  source 1..20: mol_type = genomic DNA
cagtgttcttcaactgtcag

SEQ ID NO: 603 - DNA, 20 bp, Vigna unguiculata
  source 1..20: mol_type = genomic DNA
agtgttcttcaactgtcaga

SEQ ID NO: 604 - DNA, 20 bp, Vigna unguiculata
  source 1..20: mol_type = genomic DNA
ttcaactgtcagagggaaac

SEQ ID NO: 605 - DNA, 20 bp, Vigna unguiculata
  source 1..20: mol_type = genomic DNA
tgtcagagggaaactggttc

SEQ ID NO: 606 - DNA, 20 bp, Vigna unguiculata
  source 1..20: mol_type = genomic DNA
cagagggaaactggttctgg

SEQ ID NO: 607 - DNA, 20 bp, Vigna unguiculata
  source 1..20: mol_type = genomic DNA
gggaaactggttctggtggt

SEQ ID NO: 608 - DNA, 20 bp, Vigna unguiculata
  source 1..20: mol_type = genomic DNA
aactaaaacatgtgcggttt

SEQ ID NO: 609 - DNA, 20 bp, Vigna unguiculata
  source 1..20: mol_type = genomic DNA
ttcattaactaaaacatgtg

SEQ ID NO: 610 - DNA, 20 bp, Vigna unguiculata
  source 1..20: mol_type = genomic DNA
tacgtaggtttctttatttt

SEQ ID NO: 611 - DNA, 20 bp, Vigna unguiculata
  source 1..20: mol_type = genomic DNA
ttgttacatatatattacgt

SEQ ID NO: 612 - DNA, 20 bp, Vigna unguiculata
  source 1..20: mol_type = genomic DNA
aataacacacatcgagtaat

SEQ ID NO: 613 - DNA, 20 bp, Vigna unguiculata
  source 1..20: mol_type = genomic DNA
taaagtagtacatgtatttt

SEQ ID NO: 614 - DNA, 20 bp, Vigna unguiculata
  source 1..20: mol_type = genomic DNA
tagttgatcaaatataatga

SEQ ID NO: 615 - DNA, 20 bp, Vigna unguiculata
  source 1..20: mol_type = genomic DNA
aggcactaagaataacagtg

SEQ ID NO: 616 - DNA, 4550 bp, Vigna unguiculata
  source 1..4550: mol_type = genomic DNA
agaaaagcaaataagattgaaataatgcgtggaacaacgaaccctcttgttgttggacgtgtaataggagatgtggtggaaccatttgcatgttcgattcctctgagagttgtgtacaaccataacaaagaagtgatcaacagtggtgaactcaaaccctcccaaataatcatccctccaagagttgaggttggtggagatgatctcaggaccctttacactttggtacaaccttttacttttcttaaacctaaaatcaaacttctcatcttcttcattaagctaaatcatgctcattcatgcatgtatactaatcttgcaggtcatggtggaccctgatgcacccagcccaagtaacccaactatgagggaatatcttcactggtaattattaacttctcaatacaattcttatctcaatcacttgcttattttttaagctatataaattagggtttaagatttaggatttagatattagatatgaaaaacttatctgattaataaatagatataaatagatagatggtgttggaatgtaaagagatattgaattttctgcataattgtatcctctttgtcttggtttttgaatccattgaacaccacaaacatcgtcaccagcactatgtgagtgcttgtgttttcaggtttgttatataccgaggagcttcttttatgcagctcaaactttcttcctaaacttatgaaaaatatatgattctcatttttctgattcttttattttctgacatggtttagtgtgagttattgattaatatattattattttttttctttaaaaaaatcaatgatccacactaagtcacatcataaagtaaatgatgagagtcaaaaaataggaatcacaatgtaattttcctaaatatatatgtataaaagtcaaagaaaaactaactggacaataatattttgacaactaaattttaataattttttttacaacctgaaatgatattttttaatttgttttagaatacataaaaatgagaaaatagaaaaataaaaagtcacttaaaatatgtcactaatcataaaagaagattgtcgaaatttagttgttaaaaaatcattaaattatttttaacatttttcattgtacaatttgaaaatacatttccaattacatgatttaaaaataaaaataaaaataaaaataaatgtataattaaaaaacctaaaaacattttctaactttttggaatatattttatagttgaaatttgttttttcaacccatggatcatagggtgagagagagaaaaaaaatagaatggataaagagaggggtgcgtcatgtcatggcccaatgggccttcgatgggtattcgtttcggtcgtcataatttttttcttgtttattttataatgcaaccaatttaactacataacttcttaaaatatcgacaaaatgattgaacaaacgtaaaataactgatataagttacagatataacttgccaatttacctttttagtttaattttgatcatttgtaatatggtgtaatttatgttatgagtgaaaaatataacaactattattttttttattcaacacactttttatttattttacactattaaaatctttttgtatagggaagttatttttctaaaagaggagtacttacaagttttaagaaaagaggactaacaagttaacaacacattttctaacataactttttcttgatacacacttcattgatcagaacttgttgaaaactaaatggataggattcagagttagtaaccgataatcaatttataaaaatattaattatcatactttatattttattaatgagaaagacttacatcaacccacacgtagactttttcttttgtaatatgaaagctatatatatatatatatatatatatatatatatatatatatatatatatatatatatatatatttgtgatttttaataaacttcaataaataataaaatattgtaataacagtttacttcaacaaaaaaaaaaaaaaacctatttttctactttcactccaatataatagttttaaacttttacatccataacattttcttttctttcaataaaacgtatgttgaattactgtgttaatatgatagaaaaaaaaaatcattgaatcaaaattaaaaatgataaataattaaaagaaaaatgtaattatgaaaacttattagtttttgtaattatgttttttttagttatatataacttttaatctcgtttcgtcaattcttattatttgtttttttatttttattttataatgactaatgattattacaatgattactttaactataatcattaactagaactagaatagtttattttaaaagtaagattgaatttatgtcataaaagattatctttacaatcaaaattacttaataattgtgtgtaagactgtttgtctggatcgaaaaatccgatgattcaattatactagtgtacatataagcgttgtcacgcctgtatgtacgcattttttaaatatgcgtgatattatattcataggtgatgataatgtattgtttttaagttaatatatcagaaaagtttagagaataatggttgataaacagagaaaaaaagaaaaagcaaagatagatgatttaagaaaaaacttgtaaaaataatggtcaattttaaaaaatgtaataaataattatattttaaataataaaattgatattttaaaatgtgaacacaaatagaatcttttttatatatttatagattatgttaacatttaattttttttatcgagtaaaatccaattcagtccaaactaattcattttcatacgatttcatgtaataagtgtagtatgagtgagaaacccaacttagaatcatttttatacatgtactgtggacaaattatgttatattattagtttttgtcgagaattaatttgaacaaagttttcattgatgtattgatttaattgaagcttaatcaatcttttgtaaagattatattatcttttacgtagattgatacttaataattacacctattaataaaaaaaatcaaaattttgaccaattgatagaacccaatctaatttactcaacaatgggctgagttggattcagattagtgtaaaaaatgcagaaaatgtcaacccaacctgatattgggtaatgaatttattcagatctatcaagttcagcccgctaacatctctgatatgtctatattttaaaaaataatttacattatatatatatatatatatatatatatatatatatatatatatatatatatatatatatatatatatatatatatatatattattgatctatgtctacggatcaagttaacattaaaagaattattattcacctttttttttctttctaactattgtaattaataagtataatttttaaatggtaaaagaaaataagatcaaaattaactcttttgaacttacaacatcactgagccaataatcttttttagtttttaaggattatgttaagaagctaccctttaagtatattttaaaatacataataaaaatttgctaacatacttctaaaatacgtaagatataacttgctaaagttcctttgtttaaaaaaatgtatgtatgctatcaattctttgtgtttgttagtatacatcaattttttaaaataattagtaagttataattacgattatgttagaattagtctaaaacgctatttctttttcttcgatggatctttaggatggtaatcaacattccagcaacaacagggacaaactttggtacgtacctgaactcttttatttttatttttattactactttcttctattgtttttttattattaaccatcatatatatgttgggttatatattcttttacatatatggttataagagattgtaatttcatatggatatatatgacattagtcttacacatataaaatatttgatatcacttttacaccaaaatcttaaaacaatagtgttatgggtctttattcttatatagtgtttaactttgtctattatatccaatgttagactttgactcacacttgagctatttccaacaatatatattaatttgacaggagaagagattgtgagttatgaaagtccaagaccaacatcagggattcatcgtttagtatttgtgttgtttaaacaacctggtagacagtccatacatgctcctgggtggcgtcaaaatttcatcaccagagattttgccgaatattacaatcttggaccaccagttgctgctatctacttcaattgccaacgtcaatctggttctgggggaaggagactcatcttataatcatcatcatagagatttatatgtactatacaagtctaagtttcatactaaaataacataagatctttgatggagagtataagtgtttagaacttaggttatcagaatgagattttcataaatagaacgtgaagtatgtatttggttggtagctttatgtatcaagcgatgtcacctttattagaagttcgacattgaatataaataa

SEQ ID NO: 617 - protein, 177 aa, Vigna unguiculata
MRGTTNPLVVGRVIGDVVEPFACSIPLRVVYNHNKEVINSGELKPSQIIIPPRVEVGGDDLRTLYTLVMVDPDAPSPSNPTMREYLHWMVINIPATTGTNFGEEIVSYESPRPTSGIHRLVFVLFKQPGRQSIHAPGWRQNFITRDFAEYYNLGPPVAAIYFNCQRQSGSGGRRLIL

SEQ ID NO: 618 - DNA, 20 bp, Vigna unguiculata
  source 1..20: mol_type = genomic DNA
aataagattgaaataatgcg

SEQ ID NO: 619 - DNA, 20 bp, Vigna unguiculata
  source 1..20: mol_type = genomic DNA
ttacacgtccaacaacaaga

SEQ ID NO: 620 - DNA, 20 bp, Vigna unguiculata
  source 1..20: mol_type = genomic DNA
attacacgtccaacaacaag

SEQ ID NO: 621 - DNA, 20 bp, Vigna unguiculata
  source 1..20: mol_type = genomic DNA
acaacgaaccctcttgttgt

SEQ ID NO: 622 - DNA, 20 bp, Vigna unguiculata
  source 1..20: mol_type = genomic DNA
cttgttgttggacgtgtaat

SEQ ID NO: 623 - DNA, 20 bp, Vigna unguiculata
  source 1..20: mol_type = genomic DNA
tggacgtgtaataggagatg

SEQ ID NO: 624 - DNA, 20 bp, Vigna unguiculata
  source 1..20: mol_type = genomic DNA
acgtgtaataggagatgtgg

SEQ ID NO: 625 - DNA, 20 bp, Vigna unguiculata
  source 1..20: mol_type = genomic DNA
agaggaatcgaacatgcaaa

SEQ ID NO: 626 - DNA, 20 bp, Vigna unguiculata
  source 1..20: mol_type = genomic DNA
tggttgtacacaactctcag

SEQ ID NO: 627 - DNA, 20 bp, Vigna unguiculata
  source 1..20: mol_type = genomic DNA
tgttgatcacttctttgtta

SEQ ID NO: 628 - DNA, 20 bp, Vigna unguiculata
  source 1..20: mol_type = genomic DNA
aacaaagaagtgatcaacag

SEQ ID NO: 629 - DNA, 20 bp, Vigna unguiculata
  source 1..20: mol_type = genomic DNA
ggagggatgattatttggga

SEQ ID NO: 630 - DNA, 20 bp, Vigna unguiculata
  source 1..20: mol_type = genomic DNA
tggagggatgattatttggg

SEQ ID NO: 631 - DNA, 20 bp, Vigna unguiculata
  source 1..20: mol_type = genomic DNA
tcttggagggatgattattt

SEQ ID NO: 632 - DNA, 20 bp, Vigna unguiculata
  source 1..20: mol_type = genomic DNA
ctcttggagggatgattatt

SEQ ID NO: 633 - DNA, 20 bp, Vigna unguiculata
  source 1..20: mol_type = genomic DNA
caccaacctcaactcttgga

SEQ ID NO: 634 - DNA, 20 bp, Vigna unguiculata
  source 1..20: mol_type = genomic DNA
ccaccaacctcaactcttgg

SEQ ID NO: 635 - DNA, 20 bp, Vigna unguiculata
  source 1..20: mol_type = genomic DNA
tctccaccaacctcaactct

SEQ ID NO: 636 - DNA, 20 bp, Vigna unguiculata
  source 1..20: mol_type = genomic DNA
aatcatccctccaagagttg

SEQ ID NO: 637 - DNA, 20 bp, Vigna unguiculata
  source 1..20: mol_type = genomic DNA
atccctccaagagttgaggt

SEQ ID NO: 638 - DNA, 20 bp, Vigna unguiculata
  source 1..20: mol_type = genomic DNA
cctccaagagttgaggttgg

SEQ ID NO: 639 - DNA, 20 bp, Vigna unguiculata
  source 1..20: mol_type = genomic DNA
aggttggtggagatgatctc

SEQ ID NO: 640 - DNA, 20 bp, Vigna unguiculata
  source 1..20: mol_type = genomic DNA
aggttgtaccaaagtgtaaa

SEQ ID NO: 641 - DNA, 20 bp, Vigna unguiculata
  source 1..20: mol_type = genomic DNA
aaggttgtaccaaagtgtaa

SEQ ID NO: 642 - DNA, 20 bp, Vigna unguiculata
  source 1..20: mol_type = genomic DNA
tctcaggaccctttacactt

SEQ ID NO: 643 - DNA, 20 bp, Vigna unguiculata
  source 1..20: mol_type = genomic DNA
ttaggtttaagaaaagtaaa

SEQ ID NO: 644 - DNA, 20 bp, Vigna unguiculata
  source 1..20: mol_type = genomic DNA
aagatgagaagtttgatttt

SEQ ID NO: 645 - DNA, 20 bp, Vigna unguiculata
  source 1..20: mol_type = genomic DNA
tgcatgtatactaatcttgc

SEQ ID NO: 646 - DNA, 20 bp, Vigna unguiculata
  source 1..20: mol_type = genomic DNA
tatactaatcttgcaggtca

SEQ ID NO: 647 - DNA, 20 bp, Vigna unguiculata
  source 1..20: mol_type = genomic DNA
actaatcttgcaggtcatgg

SEQ ID NO: 648 - DNA, 20 bp, Vigna unguiculata
  source 1..20: mol_type = genomic DNA
tacttgggctgggtgcatca

SEQ ID NO: 649 - DNA, 20 bp, Vigna unguiculata
  source 1..20: mol_type = genomic DNA
ttacttgggctgggtgcatc

SEQ ID NO: 650 - DNA, 20 bp, Vigna unguiculata
  source 1..20: mol_type = genomic DNA
atagttgggttacttgggct

SEQ ID NO: 651 - DNA, 20 bp, Vigna unguiculata
  source 1..20: mol_type = genomic DNA
catagttgggttacttgggc

SEQ ID NO: 652 - DNA, 20 bp, Vigna unguiculata
  source 1..20: mol_type = genomic DNA
ccctcatagttgggttactt

SEQ ID NO: 653 - DNA, 20 bp, Vigna unguiculata
  source 1..20: mol_type = genomic DNA
tccctcatagttgggttact

SEQ ID NO: 654 - DNA, 20 bp, Vigna unguiculata
  source 1..20: mol_type = genomic DNA
gaagatattccctcatagtt

SEQ ID NO: 655 - DNA, 20 bp, Vigna unguiculata
  source 1..20: mol_type = genomic DNA
gcccaagtaacccaactatg

SEQ ID NO: 656 - DNA, 20 bp, Vigna unguiculata
  source 1..20: mol_type = genomic DNA
tgaagatattccctcatagt

SEQ ID NO: 657 - DNA, 20 bp, Vigna unguiculata
  source 1..20: mol_type = genomic DNA
cccaagtaacccaactatga

SEQ ID NO: 658 - DNA, 20 bp, Vigna unguiculata
  source 1..20: mol_type = genomic DNA
ctatgagggaatatcttcac

SEQ ID NO: 659 - DNA, 20 bp, Vigna unguiculata
  source 1..20: mol_type = genomic DNA
ttttttaagctatataaatt

SEQ ID NO: 660 - DNA, 20 bp, Vigna unguiculata
  source 1..20: mol_type = genomic DNA
tttttaagctatataaatta

SEQ ID NO: 661 - DNA, 20 bp, Vigna unguiculata
  source 1..20: mol_type = genomic DNA
taaattagggtttaagattt

SEQ ID NO: 662 - DNA, 20 bp, Vigna unguiculata
  source 1..20: mol_type = genomic DNA
aatagatataaatagataga

SEQ ID NO: 663 - DNA, 20 bp, Vigna unguiculata
  source 1..20: mol_type = genomic DNA
tataaatagatagatggtgt

SEQ ID NO: 664 - DNA, 20 bp, Vigna unguiculata
  source 1..20: mol_type = genomic DNA
attcaaaaaccaagacaaag

SEQ ID NO: 665 - DNA, 20 bp, Vigna unguiculata
  source 1..20: mol_type = genomic DNA
taattgtatcctctttgtct

SEQ ID NO: 666 - DNA, 20 bp, Vigna unguiculata
  source 1..20: mol_type = genomic DNA
acgatgtttgtggtgttcaa

SEQ ID NO: 667 - DNA, 20 bp, Vigna unguiculata
  source 1..20: mol_type = genomic DNA
agtgctggtgacgatgtttg

SEQ ID NO: 668 - DNA, 20 bp, Vigna unguiculata
  source 1..20: mol_type = genomic DNA
cacaagcactcacatagtgc

SEQ ID NO: 669 - DNA, 20 bp, Vigna unguiculata
  source 1..20: mol_type = genomic DNA
atgtgagtgcttgtgttttc

SEQ ID NO: 670 - DNA, 20 bp, Vigna unguiculata
  source 1..20: mol_type = genomic DNA
ttcaggtttgttatataccg

SEQ ID NO: 671 - DNA, 20 bp, Vigna unguiculata
  source 1..20: mol_type = genomic DNA
gctgcataaaagaagctcct

SEQ ID NO: 672 - DNA, 20 bp, Vigna unguiculata
  source 1..20: mol_type = genomic DNA
catatatttttcataagttt

SEQ ID NO: 673 - DNA, 20 bp, Vigna unguiculata
  source 1..20: mol_type = genomic DNA
gattcttttattttctgaca

SEQ ID NO: 674 - DNA, 20 bp, Vigna unguiculata
  source 1..20: mol_type = genomic DNA
ctttatgatgtgacttagtg

SEQ ID NO: 675 - DNA, 20 bp, Vigna unguiculata
  source 1..20: mol_type = genomic DNA
aatgatgagagtcaaaaaat

SEQ ID NO: 676 - DNA, 20 bp, Vigna unguiculata
  source 1..20: mol_type = genomic DNA
acttttatacatatatattt

SEQ ID NO: 677 - DNA, 20 bp, Vigna unguiculata
  source 1..20: mol_type = genomic DNA
aaagtcaaagaaaaactaac

SEQ ID NO: 678 - DNA, 20 bp, Vigna unguiculata
  source 1..20: mol_type = genomic DNA
aaattaaaaaatatcatttc

SEQ ID NO: 679 - DNA, 20 bp, Vigna unguiculata
  source 1..20: mol_type = genomic DNA
ttatttttaaatcatgtaat

SEQ ID NO: 680 - DNA, 20 bp, Vigna unguiculata
  source 1..20: mol_type = genomic DNA
aaaagttagaaaatgttttt

SEQ ID NO: 681 - DNA, 20 bp, Vigna unguiculata
  source 1..20: mol_type = genomic DNA
aaaaacattttctaactttt

SEQ ID NO: 682 - DNA, 20 bp, Vigna unguiculata
  source 1..20: mol_type = genomic DNA
aaatttgttttttcaaccca

SEQ ID NO: 683 - DNA, 20 bp, Vigna unguiculata
  source 1..20: mol_type = genomic DNA
tctctcaccctatgatccat

SEQ ID NO: 684 - DNA, 20 bp, Vigna unguiculata
  source 1..20: mol_type = genomic DNA
ctctctcaccctatgatcca

SEQ ID NO: 685 - DNA, 20 bp, Vigna unguiculata
  source 1..20: mol_type = genomic DNA
tttttcaacccatggatcat

SEQ ID NO: 686 - DNA, 20 bp, Vigna unguiculata
  source 1..20: mol_type = genomic DNA
ttttcaacccatggatcata

SEQ ID NO: 687 - DNA, 20 bp, Vigna unguiculata
  source 1..20: mol_type = genomic DNA
gagagagaaaaaaaatagaa

SEQ ID NO: 688 - DNA, 20 bp, Vigna unguiculata
  source 1..20: mol_type = genomic DNA
aaaatagaatggataaagag

SEQ ID NO: 689 - DNA, 20 bp, Vigna unguiculata
  source 1..20: mol_type = genomic DNA
aaatagaatggataaagaga

SEQ ID NO: 690 - DNA, 20 bp, Vigna unguiculata
  source 1..20: mol_type = genomic DNA
aatagaatggataaagagag

SEQ ID NO: 691 - DNA, 20 bp, Vigna unguiculata
  source 1..20: mol_type = genomic DNA
gagaggggtgcgtcatgtca

SEQ ID NO: 692 - DNA, 20 bp, Vigna unguiculata
  source 1..20: mol_type = genomic DNA
tgcgtcatgtcatggcccaa

SEQ ID NO: 693 - DNA, 20 bp, Vigna unguiculata
  source 1..20: mol_type = genomic DNA
gcgtcatgtcatggcccaat

SEQ ID NO: 694 - DNA, 20 bp, Vigna unguiculata
  source 1..20: mol_type = genomic DNA
atacccatcgaaggcccatt

SEQ ID NO: 695 - DNA, 20 bp, Vigna unguiculata
  source 1..20: mol_type = genomic DNA
aatacccatcgaaggcccat

SEQ ID NO: 696 - DNA, 20 bp, Vigna unguiculata
  source 1..20: mol_type = genomic DNA
atggcccaatgggccttcga

SEQ ID NO: 697 - DNA, 20 bp, Vigna unguiculata
  source 1..20: mol_type = genomic DNA
tggcccaatgggccttcgat

SEQ ID NO: 698 - DNA, 20 bp, Vigna unguiculata
  source 1..20: mol_type = genomic DNA
ccgaaacgaatacccatcga

SEQ ID NO: 699 - DNA, 20 bp, Vigna unguiculata
  source 1..20: mol_type = genomic DNA
ccttcgatgggtattcgttt

SEQ ID NO: 700 - DNA, 20 bp, Vigna unguiculata
  source 1..20: mol_type = genomic DNA
aagaagttatgtagttaaat

SEQ ID NO: 701 - DNA, 20 bp, Vigna unguiculata
  source 1..20: mol_type = genomic DNA
attaaactaaaaaggtaaat

SEQ ID NO: 702 - DNA, 20 bp, Vigna unguiculata
  source 1..20: mol_type = genomic DNA
tgatcaaaattaaactaaaa

SEQ ID NO: 703 - DNA, 20 bp, Vigna unguiculata
  source 1..20: mol_type = genomic DNA
aattttgatcatttgtaata

SEQ ID NO: 704 - DNA, 20 bp, Vigna unguiculata
  source 1..20: mol_type = genomic DNA
ctattaaaatctttttgtat

SEQ ID NO: 705 - DNA, 20 bp, Vigna unguiculata
  source 1..20: mol_type = genomic DNA
tattaaaatctttttgtata

SEQ ID NO: 706 - DNA, 20 bp, Vigna unguiculata
  source 1..20: mol_type = genomic DNA
ggaagttatttttctaaaag

SEQ ID NO: 707 - DNA, 20 bp, Vigna unguiculata
  source 1..20: mol_type = genomic DNA
cttacaagttttaagaaaag

SEQ ID NO: 708 - DNA, 20 bp, Vigna unguiculata
  source 1..20: mol_type = genomic DNA
agaacttgttgaaaactaaa

SEQ ID NO: 709 - DNA, 20 bp, Vigna unguiculata
  source 1..20: mol_type = genomic DNA
ttgttgaaaactaaatggat

SEQ ID NO: 710 - DNA, 20 bp, Vigna unguiculata
  source 1..20: mol_type = genomic DNA
tatttttataaattgattat

SEQ ID NO: 711 - DNA, 20 bp, Vigna unguiculata
  source 1..20: mol_type = genomic DNA
aaaagaaaaagtctacgtgt

SEQ ID NO: 712 - DNA, 20 bp, Vigna unguiculata
  source 1..20: mol_type = genomic DNA
caaaagaaaaagtctacgtg

SEQ ID NO: 713 - DNA, 20 bp, Vigna unguiculata
  source 1..20: mol_type = genomic DNA
tggagtgaaagtagaaaaat

SEQ ID NO: 714 - DNA, 20 bp, Vigna unguiculata
  source 1..20: mol_type = genomic DNA
aaagtttaaaactattatat

SEQ ID NO: 715 - DNA, 20 bp, Vigna unguiculata
  source 1..20: mol_type = genomic DNA
tgaaagaaaagaaaatgtta

SEQ ID NO: 716 - DNA, 20 bp, Vigna unguiculata
  source 1..20: mol_type = genomic DNA
tgtgtgtaagactgtttgtc

SEQ ID NO: 717 - DNA, 20 bp, Vigna unguiculata
  source 1..20: mol_type = genomic DNA
cactagtataattgaatcat

SEQ ID NO: 718 - DNA, 20 bp, Vigna unguiculata
  source 1..20: mol_type = genomic DNA
tttaaaaaatgcgtacatac

SEQ ID NO: 719 - DNA, 20 bp, Vigna unguiculata
  source 1..20: mol_type = genomic DNA
atgcgtgatattatattcat

SEQ ID NO: 720 - DNA, 20 bp, Vigna unguiculata
  source 1..20: mol_type = genomic DNA
cagaaaagtttagagaataa

SEQ ID NO: 721 - DNA, 20 bp, Vigna unguiculata
  source 1..20: mol_type = genomic DNA
gaaaaaacttgtaaaaataa

SEQ ID NO: 722 - DNA, 20 bp, Vigna unguiculata
  source 1..20: mol_type = genomic DNA
tgaattagtttggactgaat

SEQ ID NO: 723 - DNA, 20 bp, Vigna unguiculata
  source 1..20: mol_type = genomic DNA
cgtatgaaaatgaattagtt

SEQ ID NO: 724 - DNA, 20 bp, Vigna unguiculata
  source 1..20: mol_type = genomic DNA
tataaaaatgattctaagtt

SEQ ID NO: 725 - DNA, 20 bp, Vigna unguiculata
  source 1..20: mol_type = genomic DNA
gtataaaaatgattctaagt

SEQ ID NO: 726 - DNA, 20 bp, Vigna unguiculata
  source 1..20: mol_type = genomic DNA
tcatttttatacatgtactg

SEQ ID NO: 727 - DNA, 20 bp, Vigna unguiculata
  source 1..20: mol_type = genomic DNA
ttttgattttttttattaat

SEQ ID NO: 728 - DNA, 20 bp, Vigna unguiculata
  source 1..20: mol_type = genomic DNA
ttagattgggttctatcaat

SEQ ID NO: 729 - DNA, 20 bp, Vigna unguiculata
  source 1..20: mol_type = genomic DNA
attgttgagtaaattagatt

SEQ ID NO: 730 - DNA, 20 bp, Vigna unguiculata
  source 1..20: mol_type = genomic DNA
cattgttgagtaaattagat

SEQ ID NO: 731 - DNA, 20 bp, Vigna unguiculata
  source 1..20: mol_type = genomic DNA
caatctaatttactcaacaa

SEQ ID NO: 732 - DNA, 20 bp, Vigna unguiculata
  source 1..20: mol_type = genomic DNA
aatctaatttactcaacaat

SEQ ID NO: 733 - DNA, 20 bp, Vigna unguiculata
  source 1..20: mol_type = genomic DNA
tactcaacaatgggctgagt

SEQ ID NO: 734 - DNA, 20 bp, Vigna unguiculata
  source 1..20: mol_type = genomic DNA
tcattacccaatatcaggtt

SEQ ID NO: 735 - DNA, 20 bp, Vigna unguiculata
  source 1..20: mol_type = genomic DNA
ttcattacccaatatcaggt

SEQ ID NO: 736 - DNA, 20 bp, Vigna unguiculata
  source 1..20: mol_type = genomic DNA
atgtcaacccaacctgatat

SEQ ID NO: 737 - DNA, 20 bp, Vigna unguiculata
  source 1..20: mol_type = genomic DNA
tgtcaacccaacctgatatt

SEQ ID NO: 738 - DNA, 20 bp, Vigna unguiculata
  source 1..20: mol_type = genomic DNA
taaattcattacccaatatc

SEQ ID NO: 739 - DNA, 20 bp, Vigna unguiculata
  source 1..20: mol_type = genomic DNA
gacatatcagagatgttagc

SEQ ID NO: 740 - DNA, 20 bp, Vigna unguiculata
  source 1..20: mol_type = genomic DNA
agacatatcagagatgttag

SEQ ID NO: 741 - DNA, 20 bp, Vigna unguiculata
  source 1..20: mol_type = genomic DNA
atattattgatctatgtcta

SEQ ID NO: 742 - DNA, 20 bp, Vigna unguiculata
  source 1..20: mol_type = genomic DNA
atagttagaaagaaaaaaaa

SEQ ID NO: 743 - DNA, 20 bp, Vigna unguiculata
  source 1..20: mol_type = genomic DNA
taataagtataatttttaaa

SEQ ID NO: 744 - DNA, 20 bp, Vigna unguiculata
  source 1..20: mol_type = genomic DNA
taaaaactaaaaaagattat

SEQ ID NO: 745 - DNA, 20 bp, Vigna unguiculata
  source 1..20: mol_type = genomic DNA
ataatcttttttagttttta

SEQ ID NO: 746 - DNA, 20 bp, Vigna unguiculata
  source 1..20: mol_type = genomic DNA
tattttaaaatatacttaaa

SEQ ID NO: 747 - DNA, 20 bp, Vigna unguiculata
  source 1..20: mol_type = genomic DNA
gtattttaaaatatacttaa

SEQ ID NO: 748 - DNA, 20 bp, Vigna unguiculata
  source 1..20: mol_type = genomic DNA
acatacatttttttaaacaa

SEQ ID NO: 749 - DNA, 20 bp, Vigna unguiculata
  source 1..20: mol_type = genomic DNA
cgctatttctttttcttcga

SEQ ID NO: 750 - DNA, 20 bp, Vigna unguiculata
  source 1..20: mol_type = genomic DNA
tttttcttcgatggatcttt

SEQ ID NO: 751 - DNA, 20 bp, Vigna unguiculata
  source 1..20: mol_type = genomic DNA
tcttcgatggatctttagga

SEQ ID NO: 752 - DNA, 20 bp, Vigna unguiculata
  source 1..20: mol_type = genomic DNA
aagtttgtccctgttgttgc

SEQ ID NO: 753 - DNA, 20 bp, Vigna unguiculata
  source 1..20: mol_type = genomic DNA
atcaacattccagcaacaac

SEQ ID NO: 754 - DNA, 20 bp, Vigna unguiculata
  source 1..20: mol_type = genomic DNA
tcaacattccagcaacaaca

SEQ ID NO: 755 - DNA, 20 bp, Vigna unguiculata
  source 1..20: mol_type = genomic DNA
gcaacaacagggacaaactt

SEQ ID NO: 756 - DNA, 20 bp, Vigna unguiculata
  source 1..20: mol_type = genomic DNA
aaataaaaataaaagagttc

SEQ ID NO: 757 - DNA, 20 bp, Vigna unguiculata
  source 1..20: mol_type = genomic DNA
ataacccaacatatatatga

SEQ ID NO: 758 - DNA, 20 bp, Vigna unguiculata
  source 1..20: mol_type = genomic DNA
attaaccatcatatatatgt

SEQ ID NO: 759 - DNA, 20 bp, Vigna unguiculata
  source 1..20: mol_type = genomic DNA
ttaaccatcatatatatgtt

SEQ ID NO: 760 - DNA, 20 bp, Vigna unguiculata
  source 1..20: mol_type = genomic DNA
tatatattcttttacatata

SEQ ID NO: 761 - DNA, 20 bp, Vigna unguiculata
  source 1..20: mol_type = genomic DNA
taagagattgtaatttcata

SEQ ID NO: 762 - DNA, 20 bp, Vigna unguiculata
  source 1..20: mol_type = genomic DNA
acactattgttttaagattt

SEQ ID NO: 763 - DNA, 20 bp, Vigna unguiculata
  source 1..20: mol_type = genomic DNA
atcttaaaacaatagtgtta

SEQ ID NO: 764 - DNA, 20 bp, Vigna unguiculata
  source 1..20: mol_type = genomic DNA
tcttaaaacaatagtgttat

SEQ ID NO: 765 - DNA, 20 bp, Vigna unguiculata
  source 1..20: mol_type = genomic DNA
tgtgagtcaaagtctaacat

SEQ ID NO: 766 - DNA, 20 bp, Vigna unguiculata
  source 1..20: mol_type = genomic DNA
gtcaaattaatatatattgt

SEQ ID NO: 767 - DNA, 20 bp, Vigna unguiculata
  source 1..20: mol_type = genomic DNA
acaatatatattaatttgac

SEQ ID NO: 768 - DNA, 20 bp, Vigna unguiculata
  source 1..20: mol_type = genomic DNA
tgaatccctgatgttggtct

SEQ ID NO: 769 - DNA, 20 bp, Vigna unguiculata
  source 1..20: mol_type = genomic DNA
gaaagtccaagaccaacatc

SEQ ID NO: 770 - DNA, 20 bp, Vigna unguiculata
  source 1..20: mol_type = genomic DNA
aaagtccaagaccaacatca

SEQ ID NO: 771 - DNA, 20 bp, Vigna unguiculata
  source 1..20: mol_type = genomic DNA
aaacgatgaatccctgatgt

SEQ ID NO: 772 - DNA, 20 bp, Vigna unguiculata
  source 1..20: mol_type = genomic DNA
tttgtgttgtttaaacaacc

SEQ ID NO: 773 - DNA, 20 bp, Vigna unguiculata
  source 1..20: mol_type = genomic DNA
gcatgtatggactgtctacc

SEQ ID NO: 774 - DNA, 20 bp, Vigna unguiculata
  source 1..20: mol_type = genomic DNA
acgccacccaggagcatgta

SEQ ID NO: 775 - DNA, 20 bp, Vigna unguiculata
  source 1..20: mol_type = genomic DNA
agacagtccatacatgctcc

SEQ ID NO: 776 - DNA, 20 bp, Vigna unguiculata
  source 1..20: mol_type = genomic DNA
gacagtccatacatgctcct

SEQ ID NO: 777 - DNA, 20 bp, Vigna unguiculata
  source 1..20: mol_type = genomic DNA
agtccatacatgctcctggg

SEQ ID NO: 778 - DNA, 20 bp, Vigna unguiculata
  source 1..20: mol_type = genomic DNA
atgaaattttgacgccaccc

SEQ ID NO: 779 - DNA, 20 bp, Vigna unguiculata
  source 1..20: mol_type = genomic DNA
gtaatattcggcaaaatctc

SEQ ID NO: 780 - DNA, 20 bp, Vigna unguiculata
  source 1..20: mol_type = genomic DNA
tggtccaagattgtaatatt

SEQ ID NO: 781 - DNA, 20 bp, Vigna unguiculata
  source 1..20: mol_type = genomic DNA
tttgccgaatattacaatct

SEQ ID NO: 782 - DNA, 20 bp, Vigna unguiculata
  source 1..20: mol_type = genomic DNA
aagtagatagcagcaactgg

SEQ ID NO: 783 - DNA, 20 bp, Vigna unguiculata
  source 1..20: mol_type = genomic DNA
ttgaagtagatagcagcaac

SEQ ID NO: 784 - DNA, 20 bp, Vigna unguiculata
  source 1..20: mol_type = genomic DNA
ccccagaaccagattgacgt

SEQ ID NO: 785 - DNA, 20 bp, Vigna unguiculata
  source 1..20: mol_type = genomic DNA
ttcaattgccaacgtcaatc

SEQ ID NO: 786 - DNA, 20 bp, Vigna unguiculata
  source 1..20: mol_type = genomic DNA
tgccaacgtcaatctggttc

SEQ ID NO: 787 - DNA, 20 bp, Vigna unguiculata
  source 1..20: mol_type = genomic DNA
gccaacgtcaatctggttct

SEQ ID NO: 788 - DNA, 20 bp, Vigna unguiculata
  source 1..20: mol_type = genomic DNA
ccaacgtcaatctggttctg

SEQ ID NO: 789 - DNA, 20 bp, Vigna unguiculata
  source 1..20: mol_type = genomic DNA
caacgtcaatctggttctgg

SEQ ID NO: 790 - DNA, 20 bp, Vigna unguiculata
  source 1..20: mol_type = genomic DNA
gtcaatctggttctggggga

SEQ ID NO: 791 - DNA, 20 bp, Vigna unguiculata
  source 1..20: mol_type = genomic DNA
aaataacataagatctttga

SEQ ID NO: 792 - DNA, 20 bp, Vigna unguiculata
  source 1..20: mol_type = genomic DNA
agtataagtgtttagaactt

SEQ ID NO: 793 - DNA, 20 bp, Vigna unguiculata
  source 1..20: mol_type = genomic DNA
tagaacgtgaagtatgtatt

SEQ ID NO: 794 - DNA, 20 bp, Vigna unguiculata
  source 1..20: mol_type = genomic DNA
acgtgaagtatgtatttggt

SEQ ID NO: 795 - DNA, 20 bp, Vigna unguiculata
  source 1..20: mol_type = genomic DNA
caatgtcgaacttctaataa

SEQ ID NO: 796 - DNA, 3720 bp, Vigna unguiculata
  source 1..3720: mol_type = genomic DNA
cctcgtagcttgtctcataacaaagcaaagtggtattgttgttttgaggaaaggagtgtcctttttcctgattgatgatgcctggaggaagtagggaccctctggttgtagggcgtgtgattggggatgtgttggacccctttgaatgttccattcccatgagggtcacctacaataacagagatatcaccaatggatgtgaattcaaaccttcacaagttttcaaccaaccaagaataactatcggtggagatgatctcagaaacttctacaccttggtaattcattcttcttcttcttcttcttttgtttcttcctcctcatcttcaactagttgtgttcaccactcactgcaatatataatttatacaatcattaatatttatttatatgaaataaaatgtcataaaatgatatttgtaaatattaaaatggatgttaatatatgtaaattaagtaattaaaattatttttcgttcatatattttgaaaggatgaactttcacatattttaatttctttcatttacagatcgcagttgatcccgatgcacctagtccaagtgaccctaatttgagggaatacctccattggtgagccaaaaattgttcgaatacaccatgaatctttgtttatatgaactgaattatacatttaagattttttcaagcttaatgctgcaatatttaaccacctctctctgtctctctctcaaacgtacttcaggttggtcactgatattcctgcaacaacgggacctagtttcggtatgtatgatatttttcacttaaacttgatgattcttttatgtatgtgtatattaataacaaaatttatgttttcttcagtgtatttgtgatttatggtttctttaagttactactaacaggaactcaaattttcaaactattagttatatttcattcaactctgaattcctaaactcgtttgacctagttgtggaataaatatgtcggtcatatgataagaagtctctaccaataataattattttacagagtatactgatgggaaataatttggatattctatacaagaatccatcagcttttatctcactcaaaagtttttctttttgtcgttaggagtagtacgtatcctttctcaaaatatgaatcatgtctcagttcatcagaatatatggtccaaaatagtacatataaacatgttcctatgtttttaatacaataaacattattcttgacatttatattttaatttccctagttaatatttattcgtattgttatagggttcagggtatttttctttaattaaatcttcagtattataattataaataattgtaattggtttcatcttcctagtttacatttgcctttggattgaatttgatctaaaggaatcttgaattcatttaacataagtgataagtgagttcgttacttatggatataggaatactaaatgtgagtgtggaacatatagtaaatgtgaaaaaaaaaagtgtttattttgaagcacggtttgtgttgcaacttttatatattatcaactaattagaacttattcctgatatgattttaagattattatttaaaaattaataagttattcaagcataaaatttgctgtcggatcatgatataaaattattcacactattattaatagaactctaacaacttaagatatgacttgaaacaatgtaattagaaaacactagtggatgaaaatcatccctaattattggttttgatgcttaaaatttaatttttttcaaaaggaattctaatgattactttgtgaaattatgacatgcatgcatatgttacatcaaccatattctaaaatattatgttatgtgagataggtagataggcatatataatatatttaaataaattcaaattaagaggattaaagttaaaaaaaaaaaatagagatgatgcattaagtcatttttacaactttgggtgataataagagcatgttttgggtgataataacaagattcagaatatacagtagttggagaatccaaattagccaatcaaactacgaatcataaaagcattgaagccttgtttgttttctctcttccatcagaaccacagagccatcgaattcttaaagtgcataatcatgtgagaaaagatagaagattctattcaagaaacgacacgaaaagcaactgttctgactgaaggagaatattcatattgaatagattaccttttgttggccatctttgcagatcacatgacaagataacaccaaaaccgtcatagctatagggtctatagatcagaaaagaacatcatacaaaaagctgcataacctgttcatgcaactggtttaacaaaatctgacaaggtgaagaggtaccataattaagaatcatatatgtttaaattcaactccaaacatatcttcaccaaaccgcagttcgagtcaattagggttaccgtgagagactaaactgtccttcttagtttcattcatagtattcacaattcaaactcaagacctgtgattgagttagaacaaactctacacaatttgattcatatgggtttggtgattccttaacaacatatataattcattaaaataaacatctttaaaaatttcgaagcttttcacctccaccaaaccccatcaaccttctcaccaggatctgcaatcttcaaatccttctcatgaaatcagaaacaatcccttgaaaaacttttgaatctaccagatttagtgaattgctggaagaaaaagaaaataaataaataaatctacttgtagcacctaccagcttatcaaaatcagagcttaccggtaggagtgatgaatgtttcttccctccgctctaagatatttccacagaattgaaatgacgcgttttatttaatttcaatttttatcgcttcaattagaaatcgacacgtaactctcttctgataataattgttattattatttatcattattttaagattttctagtattttctaattggaagatagcgaaagggacataacattagtggctttgcttttctgaaaaaaggtagacgaattttcatccactcgtaggttctttgaagtctttttataagcagtactagtaggaccttatatgtgttattaatatctgaactgaaatatactatttttattgttgataatgagcctgaaatttacactcgtaatacaaattatttgcacaggtcatgaggttgtaacatacgagagtccacgacccatgatggggattcatcgtatcgtgtttgtgttgtttcggcaactgggtcgggaaactgtgtatgcaccagggtggcgccagaatttcaacaccagagaatttgctgaactttacaaccttggattgcctgttgcggctgtctatttcaacattcagagggaatctggttctggtggaaggaggttatattagaaaaccttatagtatggaacaaaataaagtactaattaaacttccttgagggtttcggaaatattcgcgatgatcacctagtaaaatgagtgcctctttaacttaaactcaacatatataccaaataaatcactagctcggttgggtagcaccaagaaatctatatgtatccatgaatggaacccaagtatccttcggggttcattttttttttttttttcatttatgtattttgtatttaaaatattttatattataaaagtgtgttagaaatacttatgttcgatt

SEQ ID NO: 797 - protein, 177 aa, Vigna unguiculata
MMPGGSRDPLVVGRVIGDVLDPFECSIPMRVTYNNRDITNGCEFKPSQVFNQPRITIGGDDLRNFYTLIAVDPDAPSPSDPNLREYLHWLVTDIPATTGPSFGHEVVTYESPRPMMGIHRIVFVLFRQLGRETVYAPGWRQNFNTREFAELYNLGLPVAAVYFNIQRESGSGGRRLY

SEQ ID NO: 798 - DNA, 20 bp, Vigna unguiculata
  source 1..20: mol_type = genomic DNA
ttgttatgagacaagctacg

SEQ ID NO: 799 - DNA, 20 bp, Vigna unguiculata
  source 1..20: mol_type = genomic DNA
tgtctcataacaaagcaaag

SEQ ID NO: 800 - DNA, 20 bp, Vigna unguiculata
  source 1..20: mol_type = genomic DNA
aaagtggtattgttgttttg

SEQ ID NO: 801 - DNA, 20 bp, Vigna unguiculata
  source 1..20: mol_type = genomic DNA
ggtattgttgttttgaggaa

SEQ ID NO: 802 - DNA, 20 bp, Vigna unguiculata
  source 1..20: mol_type = genomic DNA
ggcatcatcaatcaggaaaa

SEQ ID NO: 803 - DNA, 20 bp, Vigna unguiculata
  source 1..20: mol_type = genomic DNA
tcctccaggcatcatcaatc

SEQ ID NO: 804 - DNA, 20 bp, Vigna unguiculata
  source 1..20: mol_type = genomic DNA
ttttcctgattgatgatgcc

SEQ ID NO: 805 - DNA, 20 bp, Vigna unguiculata
  source 1..20: mol_type = genomic DNA
tcctgattgatgatgcctgg

SEQ ID NO: 806 - DNA, 20 bp, Vigna unguiculata
  source 1..20: mol_type = genomic DNA
agagggtccctacttcctcc

SEQ ID NO: 807 - DNA, 20 bp, Vigna unguiculata
  source 1..20: mol_type = genomic DNA
tgatgatgcctggaggaagt

SEQ ID NO: 808 - DNA, 20 bp, Vigna unguiculata
  source 1..20: mol_type = genomic DNA
gatgatgcctggaggaagta

SEQ ID NO: 809 - DNA, 20 bp, Vigna unguiculata
  source 1..20: mol_type = genomic DNA
tggaggaagtagggaccctc

SEQ ID NO: 810 - DNA, 20 bp, Vigna unguiculata
  source 1..20: mol_type = genomic DNA
tcacacgccctacaaccaga

SEQ ID NO: 811 - DNA, 20 bp, Vigna unguiculata
  source 1..20: mol_type = genomic DNA
atcacacgccctacaaccag

SEQ ID NO: 812 - DNA, 20 bp, Vigna unguiculata
  source 1..20: mol_type = genomic DNA
agtagggaccctctggttgt

SEQ ID NO: 813 - DNA, 20 bp, Vigna unguiculata
  source 1..20: mol_type = genomic DNA
gtagggaccctctggttgta

SEQ ID NO: 814 - DNA, 20 bp, Vigna unguiculata
  source 1..20: mol_type = genomic DNA
ctggttgtagggcgtgtgat

SEQ ID NO: 815 - DNA, 20 bp, Vigna unguiculata
  source 1..20: mol_type = genomic DNA
tggttgtagggcgtgtgatt

SEQ ID NO: 816 - DNA, 20 bp, Vigna unguiculata
  source 1..20: mol_type = genomic DNA
ggttgtagggcgtgtgattg

SEQ ID NO: 817 - DNA, 20 bp, Vigna unguiculata
  source 1..20: mol_type = genomic DNA
gcgtgtgattggggatgtgt

SEQ ID NO: 818 - DNA, 20 bp, Vigna unguiculata
  source 1..20: mol_type = genomic DNA
tgggaatggaacattcaaag

SEQ ID NO: 819 - DNA, 20 bp, Vigna unguiculata
  source 1..20: mol_type = genomic DNA
atgggaatggaacattcaaa

SEQ ID NO: 820 - DNA, 20 bp, Vigna unguiculata
  source 1..20: mol_type = genomic DNA
catgggaatggaacattcaa

SEQ ID NO: 821 - DNA, 20 bp, Vigna unguiculata
  source 1..20: mol_type = genomic DNA
gtaggtgaccctcatgggaa

SEQ ID NO: 822 - DNA, 20 bp, Vigna unguiculata
  source 1..20: mol_type = genomic DNA
ttgaatgttccattcccatg

SEQ ID NO: 823 - DNA, 20 bp, Vigna unguiculata
  source 1..20: mol_type = genomic DNA
tgaatgttccattcccatga

SEQ ID NO: 824 - DNA, 20 bp, Vigna unguiculata
  source 1..20: mol_type = genomic DNA
ttattgtaggtgaccctcat

SEQ ID NO: 825 - DNA, 20 bp, Vigna unguiculata
  source 1..20: mol_type = genomic DNA
gttattgtaggtgaccctca

SEQ ID NO: 826 - DNA, 20 bp, Vigna unguiculata
  source 1..20: mol_type = genomic DNA
ggtgatatctctgttattgt

SEQ ID NO: 827 - DNA, 20 bp, Vigna unguiculata
  source 1..20: mol_type = genomic DNA
aataacagagatatcaccaa

SEQ ID NO: 828 - DNA, 20 bp, Vigna unguiculata
  source 1..20: mol_type = genomic DNA
aggtttgaattcacatccat

SEQ ID NO: 829 - DNA, 20 bp, Vigna unguiculata
  source 1..20: mol_type = genomic DNA
ggttggttgaaaacttgtga

SEQ ID NO: 830 - DNA, 20 bp, Vigna unguiculata
  source 1..20: mol_type = genomic DNA
caccgatagttattcttggt

SEQ ID NO: 831 - DNA, 20 bp, Vigna unguiculata
  source 1..20: mol_type = genomic DNA
tctccaccgatagttattct

SEQ ID NO: 832 - DNA, 20 bp, Vigna unguiculata
  source 1..20: mol_type = genomic DNA
aaccaaccaagaataactat

SEQ ID NO: 833 - DNA, 20 bp, Vigna unguiculata
  source 1..20: mol_type = genomic DNA
caaccaagaataactatcgg

SEQ ID NO: 834 - DNA, 20 bp, Vigna unguiculata
  source 1..20: mol_type = genomic DNA
tctcagaaacttctacacct

SEQ ID NO: 835 - DNA, 20 bp, Vigna unguiculata
  source 1..20: mol_type = genomic DNA
agaagaagaatgaattacca

SEQ ID NO: 836 - DNA, 20 bp, Vigna unguiculata
  source 1..20: mol_type = genomic DNA
acaactagttgaagatgagg

SEQ ID NO: 837 - DNA, 20 bp, Vigna unguiculata
  source 1..20: mol_type = genomic DNA
aacacaactagttgaagatg

SEQ ID NO: 838 - DNA, 20 bp, Vigna unguiculata
  source 1..20: mol_type = genomic DNA
aaattatatattgcagtgag

SEQ ID NO: 839 - DNA, 20 bp, Vigna unguiculata
  source 1..20: mol_type = genomic DNA
gatatttgtaaatattaaaa

SEQ ID NO: 840 - DNA, 20 bp, Vigna unguiculata
  source 1..20: mol_type = genomic DNA
tttcgttcatatattttgaa

SEQ ID NO: 841 - DNA, 20 bp, Vigna unguiculata
  source 1..20: mol_type = genomic DNA
tcacttggactaggtgcatc

SEQ ID NO: 842 - DNA, 20 bp, Vigna unguiculata
  source 1..20: mol_type = genomic DNA
gtcacttggactaggtgcat

SEQ ID NO: 843 - DNA, 20 bp, Vigna unguiculata
  source 1..20: mol_type = genomic DNA
aaattagggtcacttggact

SEQ ID NO: 844 - DNA, 20 bp, Vigna unguiculata
  source 1..20: mol_type = genomic DNA
tccctcaaattagggtcact

SEQ ID NO: 845 - DNA, 20 bp, Vigna unguiculata
  source 1..20: mol_type = genomic DNA
ggaggtattccctcaaatta

SEQ ID NO: 846 - DNA, 20 bp, Vigna unguiculata
  source 1..20: mol_type = genomic DNA
gtccaagtgaccctaatttg

SEQ ID NO: 847 - DNA, 20 bp, Vigna unguiculata
  source 1..20: mol_type = genomic DNA
tggaggtattccctcaaatt

SEQ ID NO: 848 - DNA, 20 bp, Vigna unguiculata
  source 1..20: mol_type = genomic DNA
tccaagtgaccctaatttga

SEQ ID NO: 849 - DNA, 20 bp, Vigna unguiculata
  source 1..20: mol_type = genomic DNA
atttgagggaatacctccat

SEQ ID NO: 850 - DNA, 20 bp, Vigna unguiculata
  source 1..20: mol_type = genomic DNA
aatttttggctcaccaatgg

SEQ ID NO: 851 - DNA, 20 bp, Vigna unguiculata
  source 1..20: mol_type = genomic DNA
aacaatttttggctcaccaa

SEQ ID NO: 852 - DNA, 20 bp, Vigna unguiculata
  source 1..20: mol_type = genomic DNA
tggtgtattcgaacaatttt

SEQ ID NO: 853 - DNA, 20 bp, Vigna unguiculata
  source 1..20: mol_type = genomic DNA
ttcatataaacaaagattca

SEQ ID NO: 854 - DNA, 20 bp, Vigna unguiculata
  source 1..20: mol_type = genomic DNA
gagagagagacagagagagg

SEQ ID NO: 855 - DNA, 20 bp, Vigna unguiculata
  source 1..20: mol_type = genomic DNA
tttgagagagagacagagag

SEQ ID NO: 856 - DNA, 20 bp, Vigna unguiculata
  source 1..20: mol_type = genomic DNA
ctctctctcaaacgtacttc

SEQ ID NO: 857 - DNA, 20 bp, Vigna unguiculata
  source 1..20: mol_type = genomic DNA
ctctcaaacgtacttcaggt

SEQ ID NO: 858 - DNA, 20 bp, Vigna unguiculata
  source 1..20: mol_type = genomic DNA
aaactaggtcccgttgttgc

SEQ ID NO: 859 - DNA, 20 bp, Vigna unguiculata
  source 1..20: mol_type = genomic DNA
cactgatattcctgcaacaa

SEQ ID NO: 860 - DNA, 20 bp, Vigna unguiculata
  source 1..20: mol_type = genomic DNA
actgatattcctgcaacaac

SEQ ID NO: 861 - DNA, 20 bp, Vigna unguiculata
  source 1..20: mol_type = genomic DNA
gcaacaacgggacctagttt

SEQ ID NO: 862 - DNA, 20 bp, Vigna unguiculata
  source 1..20: mol_type = genomic DNA
atatcatacataccgaaact

SEQ ID NO: 863 - DNA, 20 bp, Vigna unguiculata
  source 1..20: mol_type = genomic DNA
ttcagtgtatttgtgattta

SEQ ID NO: 864 - DNA, 20 bp, Vigna unguiculata
  source 1..20: mol_type = genomic DNA
ttctttaagttactactaac

SEQ ID NO: 865 - DNA, 20 bp, Vigna unguiculata
  source 1..20: mol_type = genomic DNA
caactaggtcaaacgagttt

SEQ ID NO: 866 - DNA, 20 bp, Vigna unguiculata
  source 1..20: mol_type = genomic DNA
aaactcgtttgacctagttg

SEQ ID NO: 867 - DNA, 20 bp, Vigna unguiculata
  source 1..20: mol_type = genomic DNA
gacatatttattccacaact

SEQ ID NO: 868 - DNA, 20 bp, Vigna unguiculata
  source 1..20: mol_type = genomic DNA
tagttgtggaataaatatgt

SEQ ID NO: 869 - DNA, 20 bp, Vigna unguiculata
  source 1..20: mol_type = genomic DNA
ctctgtaaaataattattat

SEQ ID NO: 870 - DNA, 20 bp, Vigna unguiculata
  source 1..20: mol_type = genomic DNA
tattttacagagtatactga

SEQ ID NO: 871 - DNA, 20 bp, Vigna unguiculata
  source 1..20: mol_type = genomic DNA
attttacagagtatactgat

SEQ ID NO: 872 - DNA, 20 bp, Vigna unguiculata
  source 1..20: mol_type = genomic DNA
tatactgatgggaaataatt

SEQ ID NO: 873 - DNA, 20 bp, Vigna unguiculata
  source 1..20: mol_type = genomic DNA
ttgagtgagataaaagctga

SEQ ID NO: 874 - DNA, 20 bp, Vigna unguiculata
  source 1..20: mol_type = genomic DNA
aagtttttctttttgtcgtt

SEQ ID NO: 875 - DNA, 20 bp, Vigna unguiculata
  source 1..20: mol_type = genomic DNA
catgattcatattttgagaa

SEQ ID NO: 876 - DNA, 20 bp, Vigna unguiculata
  source 1..20: mol_type = genomic DNA
tctcagttcatcagaatata

SEQ ID NO: 877 - DNA, 20 bp, Vigna unguiculata
  source 1..20: mol_type = genomic DNA
catgtttatatgtactattt

SEQ ID NO: 878 - DNA, 20 bp, Vigna unguiculata
  source 1..20: mol_type = genomic DNA
gtttattgtattaaaaacat

SEQ ID NO: 879 - DNA, 20 bp, Vigna unguiculata
  source 1..20: mol_type = genomic DNA
atacgaataaatattaacta

SEQ ID NO: 880 - DNA, 20 bp, Vigna unguiculata
  source 1..20: mol_type = genomic DNA
aatacgaataaatattaact

SEQ ID NO: 881 - DNA, 20 bp, Vigna unguiculata
  source 1..20: mol_type = genomic DNA
atatttattcgtattgttat

SEQ ID NO: 882 - DNA, 20 bp, Vigna unguiculata
  source 1..20: mol_type = genomic DNA
tatttattcgtattgttata

SEQ ID NO: 883 - DNA, 20 bp, Vigna unguiculata
  source 1..20: mol_type = genomic DNA
ttcgtattgttatagggttc

SEQ ID NO: 884 - DNA, 20 bp, Vigna unguiculata
  source 1..20: mol_type = genomic DNA
tcgtattgttatagggttca

SEQ ID NO: 885 - DNA, 20 bp, Vigna unguiculata
  source 1..20: mol_type = genomic DNA
taattataaataattgtaat

SEQ ID NO: 886 - DNA, 20 bp, Vigna unguiculata
  source 1..20: mol_type = genomic DNA
tccaaaggcaaatgtaaact

SEQ ID NO: 887 - DNA, 20 bp, Vigna unguiculata
  source 1..20: mol_type = genomic DNA
tcctagtttacatttgcctt

SEQ ID NO: 888 - DNA, 20 bp, Vigna unguiculata
  source 1..20: mol_type = genomic DNA
ttagatcaaattcaatccaa

SEQ ID NO: 889 - DNA, 20 bp, Vigna unguiculata
  source 1..20: mol_type = genomic DNA
ttggattgaatttgatctaa

SEQ ID NO: 890 - DNA, 20 bp, Vigna unguiculata
  source 1..20: mol_type = genomic DNA
ataagtgagttcgttactta

SEQ ID NO: 891 - DNA, 20 bp, Vigna unguiculata
  source 1..20: mol_type = genomic DNA
agttcgttacttatggatat

SEQ ID NO: 892 - DNA, 20 bp, Vigna unguiculata
  source 1..20: mol_type = genomic DNA
aggaatactaaatgtgagtg

SEQ ID NO: 893 - DNA, 20 bp, Vigna unguiculata
  source 1..20: mol_type = genomic DNA
aaagtgtttattttgaagca

SEQ ID NO: 894 - DNA, 20 bp, Vigna unguiculata
  source 1..20: mol_type = genomic DNA
aataatcttaaaatcatatc

SEQ ID NO: 895 - DNA, 20 bp, Vigna unguiculata
  source 1..20: mol_type = genomic DNA
tcaagcataaaatttgctgt

SEQ ID NO: 896 - DNA, 20 bp, Vigna unguiculata
  source 1..20: mol_type = genomic DNA
atgtaattagaaaacactag

SEQ ID NO: 897 - DNA, 20 bp, Vigna unguiculata
  source 1..20: mol_type = genomic DNA
agcatcaaaaccaataatta

SEQ ID NO: 898 - DNA, 20 bp, Vigna unguiculata
  source 1..20: mol_type = genomic DNA
tgaaaatcatccctaattat

SEQ ID NO: 899 - DNA, 20 bp, Vigna unguiculata
  source 1..20: mol_type = genomic DNA
aagcatcaaaaccaataatt

SEQ ID NO: 900 - DNA, 20 bp, Vigna unguiculata
  source 1..20: mol_type = genomic DNA
aaaatttaatttttttcaaa

SEQ ID NO: 901 - DNA, 20 bp, Vigna unguiculata
  source 1..20: mol_type = genomic DNA
taacataatattttagaata

SEQ ID NO: 902 - DNA, 20 bp, Vigna unguiculata
  source 1..20: mol_type = genomic DNA
aatattatgttatgtgagat

SEQ ID NO: 903 - DNA, 20 bp, Vigna unguiculata
  source 1..20: mol_type = genomic DNA
gttatgtgagataggtagat

SEQ ID NO: 904 - DNA, 20 bp, Vigna unguiculata
  source 1..20: mol_type = genomic DNA
ttaaataaattcaaattaag

SEQ ID NO: 905 - DNA, 20 bp, Vigna unguiculata
  source 1..20: mol_type = genomic DNA
ttaagtcatttttacaactt

SEQ ID NO: 906 - DNA, 20 bp, Vigna unguiculata
  source 1..20: mol_type = genomic DNA
taagtcatttttacaacttt

SEQ ID NO: 907 - DNA, 20 bp, Vigna unguiculata
  source 1..20: mol_type = genomic DNA
gtgataataagagcatgttt

SEQ ID NO: 908 - DNA, 20 bp, Vigna unguiculata
  source 1..20: mol_type = genomic DNA
tgataataagagcatgtttt

SEQ ID NO: 909 - DNA, 20 bp, Vigna unguiculata
  source 1..20: mol_type = genomic DNA
gattcagaatatacagtagt

SEQ ID NO: 910 - DNA, 20 bp, Vigna unguiculata
  source 1..20: mol_type = genomic DNA
cgtagtttgattggctaatt

SEQ ID NO: 911 - DNA, 20 bp, Vigna unguiculata
  source 1..20: mol_type = genomic DNA
tttatgattcgtagtttgat

SEQ ID NO: 912 - DNA, 20 bp, Vigna unguiculata
  source 1..20: mol_type = genomic DNA
tggaagagagaaaacaaaca

SEQ ID NO: 913 - DNA, 20 bp, Vigna unguiculata
  source 1..20: mol_type = genomic DNA
cgatggctctgtggttctga

SEQ ID NO: 914 - DNA, 20 bp, Vigna unguiculata
  source 1..20: mol_type = genomic DNA
ttaagaattcgatggctctg

SEQ ID NO: 915 - DNA, 20 bp, Vigna unguiculata
  source 1..20: mol_type = genomic DNA
tatgcactttaagaattcga

SEQ ID NO: 916 - DNA, 20 bp, Vigna unguiculata
  source 1..20: mol_type = genomic DNA
aaagcaactgttctgactga

SEQ ID NO: 917 - DNA, 20 bp, Vigna unguiculata
  source 1..20: mol_type = genomic DNA
ttgaatagattaccttttgt

SEQ ID NO: 918 - DNA, 20 bp, Vigna unguiculata
  source 1..20: mol_type = genomic DNA
ctgcaaagatggccaacaaa

SEQ ID NO: 919 - DNA, 20 bp, Vigna unguiculata
  source 1..20: mol_type = genomic DNA
tgtcatgtgatctgcaaaga

SEQ ID NO: 920 - DNA, 20 bp, Vigna unguiculata
  source 1..20: mol_type = genomic DNA
ccctatagctatgacggttt

SEQ ID NO: 921 - DNA, 20 bp, Vigna unguiculata
  source 1..20: mol_type = genomic DNA
tatagaccctatagctatga

SEQ ID NO: 922 - DNA, 20 bp, Vigna unguiculata
  source 1..20: mol_type = genomic DNA
accaaaaccgtcatagctat

SEQ ID NO: 923 - DNA, 20 bp, Vigna unguiculata
  source 1..20: mol_type = genomic DNA
ccaaaaccgtcatagctata

SEQ ID NO: 924 - DNA, 20 bp, Vigna unguiculata
  source 1..20: mol_type = genomic DNA
gttaaaccagttgcatgaac

SEQ ID NO: 925 - DNA, 20 bp, Vigna unguiculata
  source 1..20: mol_type = genomic DNA
gcataacctgttcatgcaac

SEQ ID NO: 926 - DNA, 20 bp, Vigna unguiculata
  source 1..20: mol_type = genomic DNA
tggtttaacaaaatctgaca

SEQ ID NO: 927 - DNA, 20 bp, Vigna unguiculata
  source 1..20: mol_type = genomic DNA
caaaatctgacaaggtgaag

SEQ ID NO: 928 - DNA, 20 bp, Vigna unguiculata
  source 1..20: mol_type = genomic DNA
acatatatgattcttaatta

SEQ ID NO: 929 - DNA, 20 bp, Vigna unguiculata
  source 1..20: mol_type = genomic DNA
cggtttggtgaagatatgtt

SEQ ID NO: 930 - DNA, 20 bp, Vigna unguiculata
  source 1..20: mol_type = genomic DNA
aattgactcgaactgcggtt

SEQ ID NO: 931 - DNA, 20 bp, Vigna unguiculata
  source 1..20: mol_type = genomic DNA
accctaattgactcgaactg

SEQ ID NO: 932 - DNA, 20 bp, Vigna unguiculata
  source 1..20: mol_type = genomic DNA
aaccgcagttcgagtcaatt

SEQ ID NO: 933 - DNA, 20 bp, Vigna unguiculata
  source 1..20: mol_type = genomic DNA
accgcagttcgagtcaatta

SEQ ID NO: 934 - DNA, 20 bp, Vigna unguiculata
  source 1..20: mol_type = genomic DNA
aaggacagtttagtctctca

SEQ ID NO: 935 - DNA, 20 bp, Vigna unguiculata
  source 1..20: mol_type = genomic DNA
tactatgaatgaaactaaga

SEQ ID NO: 936 - DNA, 20 bp, Vigna unguiculata
  source 1..20: mol_type = genomic DNA
gtttgttctaactcaatcac

SEQ ID NO: 937 - DNA, 20 bp, Vigna unguiculata
  source 1..20: mol_type = genomic DNA
tctacacaatttgattcata

SEQ ID NO: 938 - DNA, 20 bp, Vigna unguiculata
  source 1..20: mol_type = genomic DNA
ctacacaatttgattcatat

SEQ ID NO: 939 - DNA, 20 bp, Vigna unguiculata
  source 1..20: mol_type = genomic DNA
caatttgattcatatgggtt

SEQ ID NO: 940 - DNA, 20 bp, Vigna unguiculata
  source 1..20: mol_type = genomic DNA
atgaattatatatgttgtta

SEQ ID NO: 941 - DNA, 20 bp, Vigna unguiculata
  source 1..20: mol_type = genomic DNA
aggttgatggggtttggtgg

SEQ ID NO: 942 - DNA, 20 bp, Vigna unguiculata
  source 1..20: mol_type = genomic DNA
agaaggttgatggggtttgg

SEQ ID NO: 943 - DNA, 20 bp, Vigna unguiculata
  source 1..20: mol_type = genomic DNA
gtgagaaggttgatggggtt

SEQ ID NO: 944 - DNA, 20 bp, Vigna unguiculata
  source 1..20: mol_type = genomic DNA
tcctggtgagaaggttgatg

SEQ ID NO: 945 - DNA, 20 bp, Vigna unguiculata
  source 1..20: mol_type = genomic DNA
atcctggtgagaaggttgat

SEQ ID NO: 946 - DNA, 20 bp, Vigna unguiculata
  source 1..20: mol_type = genomic DNA
gatcctggtgagaaggttga

SEQ ID NO: 947 - DNA, 20 bp, Vigna unguiculata
  source 1..20: mol_type = genomic DNA
gattgcagatcctggtgaga

SEQ ID NO: 948 - DNA, 20 bp, Vigna unguiculata
  source 1..20: mol_type = genomic DNA
accccatcaaccttctcacc

SEQ ID NO: 949 - DNA, 20 bp, Vigna unguiculata
  source 1..20: mol_type = genomic DNA
gatttgaagattgcagatcc

SEQ ID NO: 950 - DNA, 20 bp, Vigna unguiculata
  source 1..20: mol_type = genomic DNA
ttgtttctgatttcatgaga

SEQ ID NO: 951 - DNA, 20 bp, Vigna unguiculata
  source 1..20: mol_type = genomic DNA
tagattcaaaagtttttcaa

SEQ ID NO: 952 - DNA, 20 bp, Vigna unguiculata
  source 1..20: mol_type = genomic DNA
gtagattcaaaagtttttca

SEQ ID NO: 953 - DNA, 20 bp, Vigna unguiculata
  source 1..20: mol_type = genomic DNA
ttccagcaattcactaaatc

SEQ ID NO: 954 - DNA, 20 bp, Vigna unguiculata
  source 1..20: mol_type = genomic DNA
taccagatttagtgaattgc

SEQ ID NO: 955 - DNA, 20 bp, Vigna unguiculata
  source 1..20: mol_type = genomic DNA
tctgattttgataagctggt

SEQ ID NO: 956 - DNA, 20 bp, Vigna unguiculata
  source 1..20: mol_type = genomic DNA
aagctctgattttgataagc

SEQ ID NO: 957 - DNA, 20 bp, Vigna unguiculata
  source 1..20: mol_type = genomic DNA
ttatcaaaatcagagcttac

SEQ ID NO: 958 - DNA, 20 bp, Vigna unguiculata
  source 1..20: mol_type = genomic DNA
caaaatcagagcttaccggt

SEQ ID NO: 959 - DNA, 20 bp, Vigna unguiculata
  source 1..20: mol_type = genomic DNA
gaaacattcatcactcctac

SEQ ID NO: 960 - DNA, 20 bp, Vigna unguiculata
  source 1..20: mol_type = genomic DNA
tggaaatatcttagagcgga

SEQ ID NO: 961 - DNA, 20 bp, Vigna unguiculata
  source 1..20: mol_type = genomic DNA
gtggaaatatcttagagcgg

SEQ ID NO: 962 - DNA, 20 bp, Vigna unguiculata
  source 1..20: mol_type = genomic DNA
tctgtggaaatatcttagag

SEQ ID NO: 963 - DNA, 20 bp, Vigna unguiculata
  source 1..20: mol_type = genomic DNA
aacgcgtcatttcaattctg

SEQ ID NO: 964 - DNA, 20 bp, Vigna unguiculata
  source 1..20: mol_type = genomic DNA
attttctagtattttctaat

SEQ ID NO: 965 - DNA, 20 bp, Vigna unguiculata
  source 1..20: mol_type = genomic DNA
tctaattggaagatagcgaa

SEQ ID NO: 966 - DNA, 20 bp, Vigna unguiculata
  source 1..20: mol_type = genomic DNA
ctaattggaagatagcgaaa

SEQ ID NO: 967 - DNA, 20 bp, Vigna unguiculata
  source 1..20: mol_type = genomic DNA
cgaaagggacataacattag

SEQ ID NO: 968 - DNA, 20 bp, Vigna unguiculata
  source 1..20: mol_type = genomic DNA
ggctttgcttttctgaaaaa

SEQ ID NO: 969 - DNA, 20 bp, Vigna unguiculata
  source 1..20: mol_type = genomic DNA
acgaattttcatccactcgt

SEQ ID NO: 970 - DNA, 20 bp, Vigna unguiculata
  source 1..20: mol_type = genomic DNA
gacttcaaagaacctacgag

SEQ ID NO: 971 - DNA, 20 bp, Vigna unguiculata
  source 1..20: mol_type = genomic DNA
tttttataagcagtactagt

SEQ ID NO: 972 - DNA, 20 bp, Vigna unguiculata
  source 1..20: mol_type = genomic DNA
agatattaataacacatata

SEQ ID NO: 973 - DNA, 20 bp, Vigna unguiculata
  source 1..20: mol_type = genomic DNA
gtattacgagtgtaaatttc

SEQ ID NO: 974 - DNA, 20 bp, Vigna unguiculata
  source 1..20: mol_type = genomic DNA
gtaatacaaattatttgcac

SEQ ID NO: 975 - DNA, 20 bp, Vigna unguiculata
  source 1..20: mol_type = genomic DNA
aattatttgcacaggtcatg

SEQ ID NO: 976 - DNA, 20 bp, Vigna unguiculata
  source 1..20: mol_type = genomic DNA
tgaatccccatcatgggtcg

SEQ ID NO: 977 - DNA, 20 bp, Vigna unguiculata
  source 1..20: mol_type = genomic DNA
cgagagtccacgacccatga

SEQ ID NO: 978 - DNA, 20 bp, Vigna unguiculata
  source 1..20: mol_type = genomic DNA
gagagtccacgacccatgat

SEQ ID NO: 979 - DNA, 20 bp, Vigna unguiculata
  source 1..20: mol_type = genomic DNA
agagtccacgacccatgatg

SEQ ID NO: 980 - DNA, 20 bp, Vigna unguiculata
  source 1..20: mol_type = genomic DNA
atacgatgaatccccatcat

SEQ ID NO: 981 - DNA, 20 bp, Vigna unguiculata
  source 1..20: mol_type = genomic DNA
gatacgatgaatccccatca

SEQ ID NO: 982 - DNA, 20 bp, Vigna unguiculata
  source 1..20: mol_type = genomic DNA
gtatcgtgtttgtgttgttt

SEQ ID NO: 983 - DNA, 20 bp, Vigna unguiculata
  source 1..20: mol_type = genomic DNA
gtttgtgttgtttcggcaac

SEQ ID NO: 984 - DNA, 20 bp, Vigna unguiculata
  source 1..20: mol_type = genomic DNA
tttgtgttgtttcggcaact

SEQ ID NO: 985 - DNA, 20 bp, Vigna unguiculata
  source 1..20: mol_type = genomic DNA
tgttgtttcggcaactgggt

SEQ ID NO: 986 - DNA, 20 bp, Vigna unguiculata
  source 1..20: mol_type = genomic DNA
gttgtttcggcaactgggtc

SEQ ID NO: 987 - DNA, 20 bp, Vigna unguiculata
  source 1..20: mol_type = genomic DNA
cgggaaactgtgtatgcacc

SEQ ID NO: 988 - DNA, 20 bp, Vigna unguiculata
  source 1..20: mol_type = genomic DNA
gggaaactgtgtatgcacca

SEQ ID NO: 989 - DNA, 20 bp, Vigna unguiculata
  source 1..20: mol_type = genomic DNA
aaactgtgtatgcaccaggg

SEQ ID NO: 990 - DNA, 20 bp, Vigna unguiculata
  source 1..20: mol_type = genomic DNA
ttgaaattctggcgccaccc

SEQ ID NO: 991 - DNA, 20 bp, Vigna unguiculata
  source 1..20: mol_type = genomic DNA
attctctggtgttgaaattc

SEQ ID NO: 992 - DNA, 20 bp, Vigna unguiculata
  source 1..20: mol_type = genomic DNA
gtaaagttcagcaaattctc

SEQ ID NO: 993 - DNA, 20 bp, Vigna unguiculata
  source 1..20: mol_type = genomic DNA
tttgctgaactttacaacct

SEQ ID NO: 994 - DNA, 20 bp, Vigna unguiculata
  source 1..20: mol_type = genomic DNA
cagccgcaacaggcaatcca

SEQ ID NO: 995 - DNA, 20 bp, Vigna unguiculata
  source 1..20: mol_type = genomic DNA
caaccttggattgcctgttg

SEQ ID NO: 996 - DNA, 20 bp, Vigna unguiculata
  source 1..20: mol_type = genomic DNA
ttgaaatagacagccgcaac

SEQ ID NO: 997 - DNA, 20 bp, Vigna unguiculata
  source 1..20: mol_type = genomic DNA
ctgtctatttcaacattcag

SEQ ID NO: 998 - DNA, 20 bp, Vigna unguiculata
  source 1..20: mol_type = genomic DNA
tgtctatttcaacattcaga

SEQ ID NO: 999 - DNA, 20 bp, Vigna unguiculata
  source 1..20: mol_type = genomic DNA
ttcaacattcagagggaatc

SEQ ID NO: 1000 - DNA, 20 bp, Vigna unguiculata
  source 1..20: mol_type = genomic DNA
attcagagggaatctggttc

SEQ ID NO: 1001 - DNA, 20 bp, Vigna unguiculata
  source 1..20: mol_type = genomic DNA
cagagggaatctggttctgg

SEQ ID NO: 1002 - DNA, 20 bp, Vigna unguiculata
  source 1..20: mol_type = genomic DNA
gggaatctggttctggtgga

SEQ ID NO: 1003 - DNA, 20 bp, Vigna unguiculata
  source 1..20: mol_type = genomic DNA
aatctggttctggtggaagg

SEQ ID NO: 1004 - DNA, 20 bp, Vigna unguiculata
  source 1..20: mol_type = genomic DNA
ttattttgttccatactata

SEQ ID NO: 1005 - DNA, 20 bp, Vigna unguiculata
  source 1..20: mol_type = genomic DNA
tattagaaaaccttatagta

SEQ ID NO: 1006 - DNA, 20 bp, Vigna unguiculata
  source 1..20: mol_type = genomic DNA
gtactaattaaacttccttg

SEQ ID NO: 1007 - DNA, 20 bp, Vigna unguiculata
  source 1..20: mol_type = genomic DNA
tactaattaaacttccttga

SEQ ID NO: 1008 - DNA, 20 bp, Vigna unguiculata
  source 1..20: mol_type = genomic DNA
gaatatttccgaaaccctca

SEQ ID NO: 1009 - DNA, 20 bp, Vigna unguiculata
  source 1..20: mol_type = genomic DNA
ttaaacttccttgagggttt

SEQ ID NO: 1010 - DNA, 20 bp, Vigna unguiculata
  source 1..20: mol_type = genomic DNA
aaagaggcactcattttact

SEQ ID NO: 1011 - DNA, 20 bp, Vigna unguiculata
  source 1..20: mol_type = genomic DNA
atgttgagtttaagttaaag

SEQ ID NO: 1012 - DNA, 20 bp, Vigna unguiculata
  source 1..20: mol_type = genomic DNA
aaccgagctagtgatttatt

SEQ ID NO: 1013 - DNA, 20 bp, Vigna unguiculata
  source 1..20: mol_type = genomic DNA
taccaaataaatcactagct

SEQ ID NO: 1014 - DNA, 20 bp, Vigna unguiculata
  source 1..20: mol_type = genomic DNA
aaataaatcactagctcggt

SEQ ID NO: 1015 - DNA, 20 bp, Vigna unguiculata
  source 1..20: mol_type = genomic DNA
aataaatcactagctcggtt

SEQ ID NO: 1016 - DNA, 20 bp, Vigna unguiculata
  source 1..20: mol_type = genomic DNA
atggatacatatagatttct

SEQ ID NO: 1017 - DNA, 20 bp, Vigna unguiculata
  source 1..20: mol_type = genomic DNA
aatctatatgtatccatgaa

SEQ ID NO: 1018 - DNA, 20 bp, Vigna unguiculata
  source 1..20: mol_type = genomic DNA
ggatacttgggttccattca

SEQ ID NO: 1019 - DNA, 20 bp, Vigna unguiculata
  source 1..20: mol_type = genomic DNA
atgaaccccgaaggatactt

SEQ ID NO: 1020 - DNA, 20 bp, Vigna unguiculata
  source 1..20: mol_type = genomic DNA
aatgaaccccgaaggatact

SEQ ID NO: 1021 - DNA, 20 bp, Vigna unguiculata
  source 1..20: mol_type = genomic DNA
aatggaacccaagtatcctt

SEQ ID NO: 1022 - DNA, 20 bp, Vigna unguiculata
  source 1..20: mol_type = genomic DNA
atggaacccaagtatccttc

SEQ ID NO: 1023 - DNA, 20 bp, Vigna unguiculata
  source 1..20: mol_type = genomic DNA
tggaacccaagtatccttcg

SEQ ID NO: 1024 - DNA, 20 bp, Vigna unguiculata
  source 1..20: mol_type = genomic DNA
aaaaaaaaaatgaaccccga

SEQ ID NO: 1025 - DNA, 1239 bp, Arachis hypogaea
  source 1..1239: mol_type = genomic DNA
atcacattcacacatgcatacatagattggagcaattatataactttgtattgaagaagtaactttaccttacattgaataagtaactaataagaaaaataattgatgatgatggcttcatcaaatgcattttcatcatcagatccacttactataggaagggtgatcggagatgtagtcgatgatttcacagaaactgtgaaaatgacagtcacttacaacaacaagcatgtctacaatggctatgagttcttcccttcttcagtttccactaaacctagggttcacattcatggaggcgacttgagatcctctttcactctggttcattaattattaataattttattacttaatatgttatatactagttatttcatgattatcatacctttactttcttttgtatttgtttgtttcagattatgacagatccagatgttcctggtcctagtgacccatacttaagagaacacttacactggtactttatatacatgcatgcactttgatttgatatgattaatttgttcaactacttaattaaacgatggatcttattagttgttatagtattaggaattattagttgtatatgtttgttttggggcacataattcacaagaattaattttaggtaacaaattgtatacttttatttttaagacatttaagttagttaattagttaatgtgatttgcataaaataattaaatatttaatttcttattataggatggtgactgatatcccaggcacaacggatgcaacatttggtaagatatagttacttccttaattagctttcacagtattataatgaatgtatgtttttcatgtaattaaaaaacacatacaggaaaggaggtgataaagtatgagatgccaaagccaaacataggaatacatagatttgttttggtgctttacaagcagaagaggaggcagacggtgaacaagattcccagttcaagggacctcttcaacacaaggaaattcgcagttgaaaatgatcttggcactcctgtggctgctgtcttcttcaatgctcaaagagaaaccgcttgtagaaagcgctgatcagctgatctttaaaacaaaataatcttttatcttaagtgtgtgcaactcatgtagtagtggcactattatggtgttttacttatatataatatggtatgggatccgccaagaataagtttaagactgttaaggttatgggtatccatctcctaaata

SEQ ID NO: 1026 - protein, 180 aa, Arachis hypogaea
MMMASSNAFSSSDPLTIGRVIGDVVDDFTETVKMTVTYNNKHVYNGYEFFPSSVSTKPRVHIHGGDLRSSFTLIMTDPDVPGPSDPYLREHLHWMVTDIPGTTDATFGKEVIKYEMPKPNIGIHRFVLVLYKQKRRQTVNKIPSSRDLFNTRKFAVENDLGTPVAAVFFNAQRETACRKR

SEQ ID NO: 1027 - DNA, 20 bp, Arachis hypogaea
  source 1..20: mol_type = genomic DNA
tcacacatgcatacatagat

SEQ ID NO: 1028 - DNA, 20 bp, Arachis hypogaea
  source 1..20: mol_type = genomic DNA
ttagttacttattcaatgta

SEQ ID NO: 1029 - DNA, 20 bp, Arachis hypogaea
  source 1..20: mol_type = genomic DNA
agaaaaataattgatgatga

SEQ ID NO: 1030 - DNA, 20 bp, Arachis hypogaea
  source 1..20: mol_type = genomic DNA
atcacccttcctatagtaag

SEQ ID NO: 1031 - DNA, 20 bp, Arachis hypogaea
  source 1..20: mol_type = genomic DNA
tcatcagatccacttactat

SEQ ID NO: 1032 - DNA, 20 bp, Arachis hypogaea
  source 1..20: mol_type = genomic DNA
cagatccacttactatagga

SEQ ID NO: 1033 - DNA, 20 bp, Arachis hypogaea
  source 1..20: mol_type = genomic DNA
agatccacttactataggaa

SEQ ID NO: 1034 - DNA, 20 bp, Arachis hypogaea
  source 1..20: mol_type = genomic DNA
cttactataggaagggtgat

SEQ ID NO: 1035 - DNA, 20 bp, Arachis hypogaea
  source 1..20: mol_type = genomic DNA
aacaacaagcatgtctacaa

SEQ ID NO: 1036 - DNA, 20 bp, Arachis hypogaea
  source 1..20: mol_type = genomic DNA
gtttagtggaaactgaagaa

SEQ ID NO: 1037 - DNA, 20 bp, Arachis hypogaea
  source 1..20: mol_type = genomic DNA
ggtttagtggaaactgaaga

SEQ ID NO: 1038 - DNA, 20 bp, Arachis hypogaea
  source 1..20: mol_type = genomic DNA
aatgtgaaccctaggtttag

SEQ ID NO: 1039 - DNA, 20 bp, Arachis hypogaea
  source 1..20: mol_type = genomic DNA
cttcagtttccactaaacct

SEQ ID NO: 1040 - DNA, 20 bp, Arachis hypogaea
  source 1..20: mol_type = genomic DNA
ttcagtttccactaaaccta

SEQ ID NO: 1041 - DNA, 20 bp, Arachis hypogaea
  source 1..20: mol_type = genomic DNA
cctccatgaatgtgaaccct

SEQ ID NO: 1042 - DNA, 20 bp, Arachis hypogaea
  source 1..20: mol_type = genomic DNA
aaacctagggttcacattca

SEQ ID NO: 1043 - DNA, 20 bp, Arachis hypogaea
  source 1..20: mol_type = genomic DNA
cctagggttcacattcatgg

SEQ ID NO: 1044 - DNA, 20 bp, Arachis hypogaea
  source 1..20: mol_type = genomic DNA
ttaatgaaccagagtgaaag

SEQ ID NO: 1045 - DNA, 20 bp, Arachis hypogaea
  source 1..20: mol_type = genomic DNA
cttgagatcctctttcactc

SEQ ID NO: 1046 - DNA, 20 bp, Arachis hypogaea
  source 1..20: mol_type = genomic DNA
acaaatacaaaagaaagtaa

SEQ ID NO: 1047 - DNA, 20 bp, Arachis hypogaea
  source 1..20: mol_type = genomic DNA
tcactaggaccaggaacatc

SEQ ID NO: 1048 - DNA, 20 bp, Arachis hypogaea
  source 1..20: mol_type = genomic DNA
atgacagatccagatgttcc

SEQ ID NO: 1049 - DNA, 20 bp, Arachis hypogaea
  source 1..20: mol_type = genomic DNA
aagtatgggtcactaggacc

SEQ ID NO: 1050 - DNA, 20 bp, Arachis hypogaea
  source 1..20: mol_type = genomic DNA
tctcttaagtatgggtcact

SEQ ID NO: 1051 - DNA, 20 bp, Arachis hypogaea
  source 1..20: mol_type = genomic DNA
gtaagtgttctcttaagtat

SEQ ID NO: 1052 - DNA, 20 bp, Arachis hypogaea
  source 1..20: mol_type = genomic DNA
tgtaagtgttctcttaagta

SEQ ID NO: 1053 - DNA, 20 bp, Arachis hypogaea
  source 1..20: mol_type = genomic DNA
acttaagagaacacttacac

SEQ ID NO: 1054 - DNA, 20 bp, Arachis hypogaea
  source 1..20: mol_type = genomic DNA
tcaactacttaattaaacga

SEQ ID NO: 1055 - DNA, 20 bp, Arachis hypogaea
  source 1..20: mol_type = genomic DNA
ttattagttgttatagtatt

SEQ ID NO: 1056 - DNA, 20 bp, Arachis hypogaea
  source 1..20: mol_type = genomic DNA
ttagttgtatatgtttgttt

SEQ ID NO: 1057 - DNA, 20 bp, Arachis hypogaea
  source 1..20: mol_type = genomic DNA
tagttgtatatgtttgtttt

SEQ ID NO: 1058 - DNA, 20 bp, Arachis hypogaea
  source 1..20: mol_type = genomic DNA
agttgtatatgtttgttttg

SEQ ID NO: 1059 - DNA, 20 bp, Arachis hypogaea
  source 1..20: mol_type = genomic DNA
aattcacaagaattaatttt

SEQ ID NO: 1060 - DNA, 20 bp, Arachis hypogaea
  source 1..20: mol_type = genomic DNA
aatatttaatttcttattat

SEQ ID NO: 1061 - DNA, 20 bp, Arachis hypogaea
  source 1..20: mol_type = genomic DNA
tttaatttcttattatagga

SEQ ID NO: 1062 - DNA, 20 bp, Arachis hypogaea
  source 1..20: mol_type = genomic DNA
aggatggtgactgatatccc

SEQ ID NO: 1063 - DNA, 20 bp, Arachis hypogaea
  source 1..20: mol_type = genomic DNA
atgttgcatccgttgtgcct

SEQ ID NO: 1064 - DNA, 20 bp, Arachis hypogaea
  source 1..20: mol_type = genomic DNA
aatgttgcatccgttgtgcc

SEQ ID NO: 1065 - DNA, 20 bp, Arachis hypogaea
  source 1..20: mol_type = genomic DNA
gactgatatcccaggcacaa

SEQ ID NO: 1066 - DNA, 20 bp, Arachis hypogaea
  source 1..20: mol_type = genomic DNA
ggcacaacggatgcaacatt

SEQ ID NO: 1067 - DNA, 20 bp, Arachis hypogaea
  source 1..20: mol_type = genomic DNA
aatactgtgaaagctaatta

SEQ ID NO: 1068 - DNA, 20 bp, Arachis hypogaea
  source 1..20: mol_type = genomic DNA
tgtaattaaaaaacacatac

SEQ ID NO: 1069 - DNA, 20 bp, Arachis hypogaea
  source 1..20: mol_type = genomic DNA
ttaaaaaacacatacaggaa

SEQ ID NO: 1070 - DNA, 20 bp, Arachis hypogaea
  source 1..20: mol_type = genomic DNA
aaaaacacatacaggaaagg

SEQ ID NO: 1071 - DNA, 20 bp, Arachis hypogaea
  source 1..20: mol_type = genomic DNA
tgtattcctatgtttggctt

SEQ ID NO: 1072 - DNA, 20 bp, Arachis hypogaea
  source 1..20: mol_type = genomic DNA
gagatgccaaagccaaacat

SEQ ID NO: 1073 - DNA, 20 bp, Arachis hypogaea
  source 1..20: mol_type = genomic DNA
aatctatgtattcctatgtt

SEQ ID NO: 1074 - DNA, 20 bp, Arachis hypogaea
  source 1..20: mol_type = genomic DNA
aggaatacatagatttgttt

SEQ ID NO: 1075 - DNA, 20 bp, Arachis hypogaea
  source 1..20: mol_type = genomic DNA
tggtgctttacaagcagaag

SEQ ID NO: 1076 - DNA, 20 bp, Arachis hypogaea
  source 1..20: mol_type = genomic DNA
tgctttacaagcagaagagg

SEQ ID NO: 1077 - DNA, 20 bp, Arachis hypogaea
  source 1..20: mol_type = genomic DNA
caagcagaagaggaggcaga

SEQ ID NO: 1078 - DNA, 20 bp, Arachis hypogaea
  source 1..20: mol_type = genomic DNA
tgaacaagattcccagttca

SEQ ID NO: 1079 - DNA, 20 bp, Arachis hypogaea
  source 1..20: mol_type = genomic DNA
ttgaagaggtcccttgaact

SEQ ID NO: 1080 - DNA, 20 bp, Arachis hypogaea
  source 1..20: mol_type = genomic DNA
gaacaagattcccagttcaa

SEQ ID NO: 1081 - DNA, 20 bp, Arachis hypogaea
  source 1..20: mol_type = genomic DNA
gttgaagaggtcccttgaac

SEQ ID NO: 1082 - DNA, 20 bp, Arachis hypogaea
  source 1..20: mol_type = genomic DNA
cgaatttccttgtgttgaag

SEQ ID NO: 1083 - DNA, 20 bp, Arachis hypogaea
  source 1..20: mol_type = genomic DNA
caagggacctcttcaacaca

SEQ ID NO: 1084 - DNA, 20 bp, Arachis hypogaea
  source 1..20: mol_type = genomic DNA
ttcgcagttgaaaatgatct

SEQ ID NO: 1085 - DNA, 20 bp, Arachis hypogaea
  source 1..20: mol_type = genomic DNA
aaatgatcttggcactcctg

SEQ ID NO: 1086 - DNA, 20 bp, Arachis hypogaea
  source 1..20: mol_type = genomic DNA
ttgaagaagacagcagccac

SEQ ID NO: 1087 - DNA, 20 bp, Arachis hypogaea
  source 1..20: mol_type = genomic DNA
tgatcagcgctttctacaag

SEQ ID NO: 1088 - DNA, 20 bp, Arachis hypogaea
  source 1..20: mol_type = genomic DNA
gtgtgcaactcatgtagtag

SEQ ID NO: 1089 - DNA, 20 bp, Arachis hypogaea
  source 1..20: mol_type = genomic DNA
atgtagtagtggcactatta

SEQ ID NO: 1090 - DNA, 20 bp, Arachis hypogaea
  source 1..20: mol_type = genomic DNA
tgttttacttatatataata

SEQ ID NO: 1091 - DNA, 20 bp, Arachis hypogaea
  source 1..20: mol_type = genomic DNA
tacttatatataatatggta

SEQ ID NO: 1092 - DNA, 20 bp, Arachis hypogaea
  source 1..20: mol_type = genomic DNA
acttatatataatatggtat

SEQ ID NO: 1093 - DNA, 20 bp, Arachis hypogaea
  source 1..20: mol_type = genomic DNA
agtcttaaacttattcttgg

SEQ ID NO: 1094 - DNA, 20 bp, Arachis hypogaea
  source 1..20: mol_type = genomic DNA
aacagtcttaaacttattct

SEQ ID NO: 1095 - DNA, 20 bp, Arachis hypogaea
  source 1..20: mol_type = genomic DNA
gaataagtttaagactgtta

SEQ ID NO: 1096 - DNA, 20 bp, Arachis hypogaea
  source 1..20: mol_type = genomic DNA
gtttaagactgttaaggtta

SEQ ID NO: 1097 - DNA, 20 bp, Arachis hypogaea
  source 1..20: mol_type = genomic DNA
tttaagactgttaaggttat

SEQ ID NO: 1098 - DNA, 1353 bp, Arachis hypogaea
  source 1..1353: mol_type = genomic DNA
tgcatacatagattggagcaattatatatctttgtattgaagaggtaactttaccttatattgaataagtaactaataagaaaaataattgatgatgatggcttcatcaaatgcattttcatcatcagatccacttactatagggagggtgattggagatgtagtcgatgatttcacagaaaccgtgaaaatgacagtcacttacaacaacaagcatgtctacaatggctttgagttcttcccttcttcaatttccgctaagcctagggttcacattcatggaggcgacttgagatcctctttcactctggttcattaatgattgatgatttcattacttaatatgttatatactctttatttcatgattatcatacctttactttttttttgtaattgtatttgtttgttccagattatgacagatccagatgttcctggtcctagtgacccatacttaagagaacacttacactggtaccttatatacatgcatgcactttaatttgatacgattaatttgttcaactacttaattaaacaatggatcttatttagttgttatagtattaggaattattaagtgatgtatagttgtatatgtttgttttaggggcacagaataacaaacaaattgtatacttttatttttaagacattcaagttagttaatgtgatttgcataaaataattagatattaattacttattataggatggtgactgatatcccagggacaacggatgcaacatttggtaagatattagttagtttactaattagttttcatagtattataatgaatgcatcctaagttcatgtaattaaaaacatatacaggaaaggaggtgataaagtatgagatgccaaagccaaacataggaatacatagatttgttttggtgctttacaagcagaagaggaggcaaacagtgagcaaggttcccaattcaagggacctcttcaacacaaggaaattcgtagttgaaaatgatcttggaactcctgtggctgctgtcttcttcaatgctcaaagagaaaccgcttgtaggaagcgctgatcagctgatctttaagacaaaaaaataatcttttatcttaaatgtgtgcaactcatgtagtagtggcactgttatggtgctttacttatatctaatatggtatgggatctaccaagaataagtttaagactgctaaggttatgggtatccattccctaaatagctggcctactattaactaactattctagtaagtaagttttatcagtttgcattgtagtttgctaattaagctttgtttaactttcattttctaattagttaagtttgagaccttaacttttctgtcta

SEQ ID NO: 1099 - protein, 179 aa, Arachis hypogaea
MMASSNAFSSSDPLTIGRVIGDVVDDFTETVKMTVTYNNKHVYNGYEFFPSSVSTKPRVHIHGGDLRSSFTLIMTDPDVPGPSDPYLREHLHWMVTDIPGTTDATFGKEVIKYEMPKPNIGIHRFVLVLYKQKRRQTVNKIPSSRDLFNTRKFAVENDLGTPVAAVFFNAQRETACRKR

SEQ ID NO: 1100 - DNA, 20 bp, Arachis hypogaea
  source 1..20: mol_type = genomic DNA
tatatatctttgtattgaag

SEQ ID NO: 1101 - DNA, 20 bp, Arachis hypogaea
  source 1..20: mol_type = genomic DNA
ttagttacttattcaatata

SEQ ID NO: 1102 - DNA, 20 bp, Arachis hypogaea
  source 1..20: mol_type = genomic DNA
agaaaaataattgatgatga

SEQ ID NO: 1103 - DNA, 20 bp, Arachis hypogaea
  source 1..20: mol_type = genomic DNA
atcaccctccctatagtaag

SEQ ID NO: 1104 - DNA, 20 bp, Arachis hypogaea
  source 1..20: mol_type = genomic DNA
tcatcagatccacttactat

SEQ ID NO: 1105 - DNA, 20 bp, Arachis hypogaea
  source 1..20: mol_type = genomic DNA
catcagatccacttactata

SEQ ID NO: 1106 - DNA, 20 bp, Arachis hypogaea
  source 1..20: mol_type = genomic DNA
cagatccacttactataggg

SEQ ID NO: 1107 - DNA, 20 bp, Arachis hypogaea
  source 1..20: mol_type = genomic DNA
agatccacttactataggga

SEQ ID NO: 1108 - DNA, 20 bp, Arachis hypogaea
  source 1..20: mol_type = genomic DNA
cttactatagggagggtgat

SEQ ID NO: 1109 - DNA, 20 bp, Arachis hypogaea
  source 1..20: mol_type = genomic DNA
gtaagtgactgtcattttca

SEQ ID NO: 1110 - DNA, 20 bp, Arachis hypogaea
  source 1..20: mol_type = genomic DNA
aacaacaagcatgtctacaa

SEQ ID NO: 1111 - DNA, 20 bp, Arachis hypogaea
  source 1..20: mol_type = genomic DNA
gcttagcggaaattgaagaa

SEQ ID NO: 1112 - DNA, 20 bp, Arachis hypogaea
  source 1..20: mol_type = genomic DNA
ggcttagcggaaattgaaga

SEQ ID NO: 1113 - DNA, 20 bp, Arachis hypogaea
  source 1..20: mol_type = genomic DNA
aatgtgaaccctaggcttag

SEQ ID NO: 1114 - DNA, 20 bp, Arachis hypogaea
  source 1..20: mol_type = genomic DNA
cttcaatttccgctaagcct

SEQ ID NO: 1115 - DNA, 20 bp, Arachis hypogaea
  source 1..20: mol_type = genomic DNA
ttcaatttccgctaagccta

SEQ ID NO: 1116 - DNA, 20 bp, Arachis hypogaea
  source 1..20: mol_type = genomic DNA
cctccatgaatgtgaaccct

SEQ ID NO: 1117 - DNA, 20 bp, Arachis hypogaea
  source 1..20: mol_type = genomic DNA
aagcctagggttcacattca

SEQ ID NO: 1118 - DNA, 20 bp, Arachis hypogaea
  source 1..20: mol_type = genomic DNA
cctagggttcacattcatgg

SEQ ID NO: 1119 - DNA, 20 bp, Arachis hypogaea
  source 1..20: mol_type = genomic DNA
ttaatgaaccagagtgaaag

SEQ ID NO: 1120 - DNA, 20 bp, Arachis hypogaea
  source 1..20: mol_type = genomic DNA
cttgagatcctctttcactc

SEQ ID NO: 1121 - DNA, 20 bp, Arachis hypogaea
  source 1..20: mol_type = genomic DNA
caattacaaaaaaaaagtaa

SEQ ID NO: 1122 - DNA, 20 bp, Arachis hypogaea
  source 1..20: mol_type = genomic DNA
catctggatctgtcataatc

SEQ ID NO: 1123 - DNA, 20 bp, Arachis hypogaea
  source 1..20: mol_type = genomic DNA
tcactaggaccaggaacatc

SEQ ID NO: 1124 - DNA, 20 bp, Arachis hypogaea
  source 1..20: mol_type = genomic DNA
atgacagatccagatgttcc

SEQ ID NO: 1125 - DNA, 20 bp, Arachis hypogaea
  source 1..20: mol_type = genomic DNA
aagtatgggtcactaggacc

SEQ ID NO: 1126 - DNA, 20 bp, Arachis hypogaea
  source 1..20: mol_type = genomic DNA
tctcttaagtatgggtcact

SEQ ID NO: 1127 - DNA, 20 bp, Arachis hypogaea
  source 1..20: mol_type = genomic DNA
gtaagtgttctcttaagtat

SEQ ID NO: 1128 - DNA, 20 bp, Arachis hypogaea
  source 1..20: mol_type = genomic DNA
tgtaagtgttctcttaagta

SEQ ID NO: 1129 - DNA, 20 bp, Arachis hypogaea
  source 1..20: mol_type = genomic DNA
acttaagagaacacttacac

SEQ ID NO: 1130 - DNA, 20 bp, Arachis hypogaea
  source 1..20: mol_type = genomic DNA
aaagtgcatgcatgtatata

SEQ ID NO: 1131 - DNA, 20 bp, Arachis hypogaea
  source 1..20: mol_type = genomic DNA
tcaactacttaattaaacaa

SEQ ID NO: 1132 - DNA, 20 bp, Arachis hypogaea
  source 1..20: mol_type = genomic DNA
tatttagttgttatagtatt

SEQ ID NO: 1133 - DNA, 20 bp, Arachis hypogaea
  source 1..20: mol_type = genomic DNA
tagttgtatatgtttgtttt

SEQ ID NO: 1134 - DNA, 20 bp, Arachis hypogaea
  source 1..20: mol_type = genomic DNA
agttgtatatgtttgtttta

SEQ ID NO: 1135 - DNA, 20 bp, Arachis hypogaea
  source 1..20: mol_type = genomic DNA
gttgtatatgtttgttttag

SEQ ID NO: 1136 - DNA, 20 bp, Arachis hypogaea
  source 1..20: mol_type = genomic DNA
agatattaattacttattat

SEQ ID NO: 1137 - DNA, 20 bp, Arachis hypogaea
  source 1..20: mol_type = genomic DNA
attaattacttattatagga

SEQ ID NO: 1138 - DNA, 20 bp, Arachis hypogaea
  source 1..20: mol_type = genomic DNA
aggatggtgactgatatccc

SEQ ID NO: 1139 - DNA, 20 bp, Arachis hypogaea
  source 1..20: mol_type = genomic DNA
ggatggtgactgatatccca

SEQ ID NO: 1140 - DNA, 20 bp, Arachis hypogaea
  source 1..20: mol_type = genomic DNA
atgttgcatccgttgtccct

SEQ ID NO: 1141 - DNA, 20 bp, Arachis hypogaea
  source 1..20: mol_type = genomic DNA
aatgttgcatccgttgtccc

SEQ ID NO: 1142 - DNA, 20 bp, Arachis hypogaea
  source 1..20: mol_type = genomic DNA
gactgatatcccagggacaa

SEQ ID NO: 1143 - DNA, 20 bp, Arachis hypogaea
  source 1..20: mol_type = genomic DNA
gggacaacggatgcaacatt

SEQ ID NO: 1144 - DNA, 20 bp, Arachis hypogaea
  source 1..20: mol_type = genomic DNA
gtttttaattacatgaactt

SEQ ID NO: 1145 - DNA, 20 bp, Arachis hypogaea
  source 1..20: mol_type = genomic DNA
atgtaattaaaaacatatac

SEQ ID NO: 1146 - DNA, 20 bp, Arachis hypogaea
  source 1..20: mol_type = genomic DNA
attaaaaacatatacaggaa

SEQ ID NO: 1147 - DNA, 20 bp, Arachis hypogaea
  source 1..20: mol_type = genomic DNA
aaaaacatatacaggaaagg

SEQ ID NO: 1148 - DNA, 20 bp, Arachis hypogaea
  source 1..20: mol_type = genomic DNA
tgtattcctatgtttggctt

SEQ ID NO: 1149 - DNA, 20 bp, Arachis hypogaea
  source 1..20: mol_type = genomic DNA
gagatgccaaagccaaacat

SEQ ID NO: 1150 - DNA, 20 bp, Arachis hypogaea
  source 1..20: mol_type = genomic DNA
aatctatgtattcctatgtt

SEQ ID NO: 1151 - DNA, 20 bp, Arachis hypogaea
  source 1..20: mol_type = genomic DNA
aggaatacatagatttgttt

SEQ ID NO: 1152 - DNA, 20 bp, Arachis hypogaea
  source 1..20: mol_type = genomic DNA
tggtgctttacaagcagaag

SEQ ID NO: 1153 - DNA, 20 bp, Arachis hypogaea
  source 1..20: mol_type = genomic DNA
tgctttacaagcagaagagg

SEQ ID NO: 1154 - DNA, 20 bp, Arachis hypogaea
  source 1..20: mol_type = genomic DNA
gaggaggcaaacagtgagca

SEQ ID NO: 1155 - DNA, 20 bp, Arachis hypogaea
  source 1..20: mol_type = genomic DNA
tgagcaaggttcccaattca

SEQ ID NO: 1156 - DNA, 20 bp, Arachis hypogaea
  source 1..20: mol_type = genomic DNA
ttgaagaggtcccttgaatt

SEQ ID NO: 1157 - DNA, 20 bp, Arachis hypogaea
  source 1..20: mol_type = genomic DNA
gagcaaggttcccaattcaa

SEQ ID NO: 1158 - DNA, 20 bp, Arachis hypogaea
  source 1..20: mol_type = genomic DNA
gttgaagaggtcccttgaat

SEQ ID NO: 1159 - DNA, 20 bp, Arachis hypogaea
  source 1..20: mol_type = genomic DNA
cgaatttccttgtgttgaag

SEQ ID NO: 1160 - DNA, 20 bp, Arachis hypogaea
  source 1..20: mol_type = genomic DNA
caagggacctcttcaacaca

SEQ ID NO: 1161 - DNA, 20 bp, Arachis hypogaea
  source 1..20: mol_type = genomic DNA
ttcgtagttgaaaatgatct

SEQ ID NO: 1162 - DNA, 20 bp, Arachis hypogaea
  source 1..20: mol_type = genomic DNA
aaatgatcttggaactcctg

SEQ ID NO: 1163 - DNA, 20 bp, Arachis hypogaea
  source 1..20: mol_type = genomic DNA
ttgaagaagacagcagccac

SEQ ID NO: 1164 - DNA, 20 bp, Arachis hypogaea
  source 1..20: mol_type = genomic DNA
ctcaaagagaaaccgcttgt

SEQ ID NO: 1165 - DNA, 20 bp, Arachis hypogaea
  source 1..20: mol_type = genomic DNA
tgatcagcgcttcctacaag

SEQ ID NO: 1166 - DNA, 20 bp, Arachis hypogaea
  source 1..20: mol_type = genomic DNA
gtgtgcaactcatgtagtag

SEQ ID NO: 1167 - DNA, 20 bp, Arachis hypogaea
  source 1..20: mol_type = genomic DNA
atgtagtagtggcactgtta

SEQ ID NO: 1168 - DNA, 20 bp, Arachis hypogaea
  source 1..20: mol_type = genomic DNA
tgctttacttatatctaata

SEQ ID NO: 1169 - DNA, 20 bp, Arachis hypogaea
  source 1..20: mol_type = genomic DNA
tacttatatctaatatggta

SEQ ID NO: 1170 - DNA, 20 bp, Arachis hypogaea
  source 1..20: mol_type = genomic DNA
acttatatctaatatggtat

SEQ ID NO: 1171 - DNA, 20 bp, Arachis hypogaea
  source 1..20: mol_type = genomic DNA
agcagtcttaaacttattct

SEQ ID NO: 1172 - DNA, 20 bp, Arachis hypogaea
  source 1..20: mol_type = genomic DNA
gaataagtttaagactgcta

SEQ ID NO: 1173 - DNA, 20 bp, Arachis hypogaea
  source 1..20: mol_type = genomic DNA
gtttaagactgctaaggtta

SEQ ID NO: 1174 - DNA, 20 bp, Arachis hypogaea
  source 1..20: mol_type = genomic DNA
tttaagactgctaaggttat

SEQ ID NO: 1175 - DNA, 20 bp, Arachis hypogaea
  source 1..20: mol_type = genomic DNA
taggccagctatttagggaa

SEQ ID NO: 1176 - DNA, 20 bp, Arachis hypogaea
  source 1..20: mol_type = genomic DNA
aatagtaggccagctattta

SEQ ID NO: 1177 - DNA, 20 bp, Arachis hypogaea
  source 1..20: mol_type = genomic DNA
taatagtaggccagctattt

SEQ ID NO: 1178 - DNA, 20 bp, Arachis hypogaea
  source 1..20: mol_type = genomic DNA
gtatccattccctaaatagc

SEQ ID NO: 1179 - DNA, 20 bp, Arachis hypogaea
  source 1..20: mol_type = genomic DNA
tagaatagttagttaatagt

SEQ ID NO: 1180 - DNA, 1525 bp, Arachis hypogaea
  source 1..1525: mol_type = genomic DNA
aagctaagctagtaattgtatttgtatctctcactctttattaatttcctctatcttcttcttatttgcttgttaataagaattatattattctcctaatggcaagaataatgtcatcagagcctttaattgtagggagagtggtaggagatgttcttgatccattcaatgcaagcataaggatgagtgttagttatgggaacaggcaagtgtacaatggccatgagttcttcccctccacagtcaccttcaagcccaaggttgagattggtggaactgaattgaggcccttctttacactggttggtacctctatatatatatatactcctctcatctcttcttcttttgttcctttttctctttataggtttaaaaatgggaaaatctttggcagtttggctgttgttattatctttatataataatagtaatagtagctggctctattataatagctggtggctacttctacgagaatgtcttcgtgtaaagacaatatatgaattattagatgatgcagttaaacagttcataatatcatctacgttttcatagaagtagccaacactaatacggtcagtagtattatgatacatatatatacgtagaatgtaaatgtctctcttttgggttgcaggtcatgactgatccggatgttcctggccctagtgatccttatctcagagagcacttgcattggtaaaacttaattaaatttttactacatgaaaattaattagggtaacaactaaaaccaaaataaaacagctgtttattacaaacacataatgcatcatttggtcatatgaaagagacacacatattatcacgattcataggcatgcattaatttcacatagctagaggtgtatctagatctctaagagtcaagcatattaaaaaaattgaaatatatatctgcaggatagttacagacattccaggcacaacagatgccacatttggtaggtctctcattcctcttttgatatctatggacactacaagactgagaaataataataatgatgttgatgtatgtttaattatttgttttagggaaagagttggtgagctacgagatgccaaagcctaacattgggatccataggtatgtttttgtgctcttcaagcaaaaacgaaggcagtgtgttagcaccattccttcttgcagggatcacttcaacacccgcactttcgccgccgataacgacctcggcctccccgtcgctgccgtctacttcaatgctcagagggaaaccgctgccaggaggcgttaattaattaattaagaagtagctagagatccaagtgtgtctgaatgaaaaataatttacttgtgttgcagaaaaaagggaatcatttcttttttgactatcatgtatgtatgtatgtatgtatgtatgtatgtatgtagaagggttactttttcattatcacatatatgctgtgtgttttaatttccatggtatatacgccatgtcgtttcatctaatcataataattactactttaggatttg

SEQ ID NO: 1181 - protein, 175 aa, Arachis hypogaea
MARIMSSEPLIVGRVVGDVLDPFNASIRMSVSYGNRQVYNGHEFFPSTVTFKPKVEIGGTELRPFFTLVMTDPDVPGPSDPYLREHLHWIVTDIPGTTDATFGKELVSYEMPKPNIGIHRYVFVLFKQKRRQCVSTIPSCRDHFNTRTFAADNDLGLPVAAVYFNAQRETAARRR

SEQ ID NO: 1182 - DNA, 20 bp, Arachis hypogaea
  source 1..20: mol_type = genomic DNA
agcaaataagaagaagatag

SEQ ID NO: 1183 - DNA, 20 bp, Arachis hypogaea
  source 1..20: mol_type = genomic DNA
gaattatattattctcctaa

SEQ ID NO: 1184 - DNA, 20 bp, Arachis hypogaea
  source 1..20: mol_type = genomic DNA
atgacattattcttgccatt

SEQ ID NO: 1185 - DNA, 20 bp, Arachis hypogaea
  source 1..20: mol_type = genomic DNA
accactctccctacaattaa

SEQ ID NO: 1186 - DNA, 20 bp, Arachis hypogaea
  source 1..20: mol_type = genomic DNA
tcatcagagcctttaattgt

SEQ ID NO: 1187 - DNA, 20 bp, Arachis hypogaea
  source 1..20: mol_type = genomic DNA
catcagagcctttaattgta

SEQ ID NO: 1188 - DNA, 20 bp, Arachis hypogaea
  source 1..20: mol_type = genomic DNA
gcctttaattgtagggagag

SEQ ID NO: 1189 - DNA, 20 bp, Arachis hypogaea
  source 1..20: mol_type = genomic DNA
ttaattgtagggagagtggt

SEQ ID NO: 1190 - DNA, 20 bp, Arachis hypogaea
  source 1..20: mol_type = genomic DNA
atccttatgcttgcattgaa

SEQ ID NO: 1191 - DNA, 20 bp, Arachis hypogaea
  source 1..20: mol_type = genomic DNA
atccattcaatgcaagcata

SEQ ID NO: 1192 - DNA, 20 bp, Arachis hypogaea
  source 1..20: mol_type = genomic DNA
ataaggatgagtgttagtta

SEQ ID NO: 1193 - DNA, 20 bp, Arachis hypogaea
  source 1..20: mol_type = genomic DNA
taaggatgagtgttagttat

SEQ ID NO: 1194 - DNA, 20 bp, Arachis hypogaea
  source 1..20: mol_type = genomic DNA
tgagtgttagttatgggaac

SEQ ID NO: 1195 - DNA, 20 bp, Arachis hypogaea
  source 1..20: mol_type = genomic DNA
gggaacaggcaagtgtacaa

SEQ ID NO: 1196 - DNA, 20 bp, Arachis hypogaea
  source 1..20: mol_type = genomic DNA
ctgtggaggggaagaactca

SEQ ID NO: 1197 - DNA, 20 bp, Arachis hypogaea
  source 1..20: mol_type = genomic DNA
gcttgaaggtgactgtggag

SEQ ID NO: 1198 - DNA, 20 bp, Arachis hypogaea
  source 1..20: mol_type = genomic DNA
ggcttgaaggtgactgtgga

SEQ ID NO: 1199 - DNA, 20 bp, Arachis hypogaea
  source 1..20: mol_type = genomic DNA
gggcttgaaggtgactgtgg

SEQ ID NO: 1200 - DNA, 20 bp, Arachis hypogaea
  source 1..20: mol_type = genomic DNA
cttgggcttgaaggtgactg

SEQ ID NO: 1201 - DNA, 20 bp, Arachis hypogaea
  source 1..20: mol_type = genomic DNA
aatctcaaccttgggcttga

SEQ ID NO: 1202 - DNA, 20 bp, Arachis hypogaea
  source 1..20: mol_type = genomic DNA
cacagtcaccttcaagccca

SEQ ID NO: 1203 - DNA, 20 bp, Arachis hypogaea
  source 1..20: mol_type = genomic DNA
gttccaccaatctcaacctt

SEQ ID NO: 1204 - DNA, 20 bp, Arachis hypogaea
  source 1..20: mol_type = genomic DNA
agttccaccaatctcaacct

SEQ ID NO: 1205 - DNA, 20 bp, Arachis hypogaea
  source 1..20: mol_type = genomic DNA
ttcaagcccaaggttgagat

SEQ ID NO: 1206 - DNA, 20 bp, Arachis hypogaea
  source 1..20: mol_type = genomic DNA
aagcccaaggttgagattgg

SEQ ID NO: 1207 - DNA, 20 bp, Arachis hypogaea
  source 1..20: mol_type = genomic DNA
agattggtggaactgaattg

SEQ ID NO: 1208 - DNA, 20 bp, Arachis hypogaea
  source 1..20: mol_type = genomic DNA
gtaccaaccagtgtaaagaa

SEQ ID NO: 1209 - DNA, 20 bp, Arachis hypogaea
  source 1..20: mol_type = genomic DNA
ggtaccaaccagtgtaaaga

SEQ ID NO: 1210 - DNA, 20 bp, Arachis hypogaea
  source 1..20: mol_type = genomic DNA
attgaggcccttctttacac

SEQ ID NO: 1211 - DNA, 20 bp, Arachis hypogaea
  source 1..20: mol_type = genomic DNA
aggcccttctttacactggt

SEQ ID NO: 1212 - DNA, 20 bp, Arachis hypogaea
  source 1..20: mol_type = genomic DNA
aggagtatatatatatatag

SEQ ID NO: 1213 - DNA, 20 bp, Arachis hypogaea
  source 1..20: mol_type = genomic DNA
acaaaagaagaagagatgag

SEQ ID NO: 1214 - DNA, 20 bp, Arachis hypogaea
  source 1..20: mol_type = genomic DNA
ttaaacctataaagagaaaa

SEQ ID NO: 1215 - DNA, 20 bp, Arachis hypogaea
  source 1..20: mol_type = genomic DNA
ttgttcctttttctctttat

SEQ ID NO: 1216 - DNA, 20 bp, Arachis hypogaea
  source 1..20: mol_type = genomic DNA
tctctttataggtttaaaaa

SEQ ID NO: 1217 - DNA, 20 bp, Arachis hypogaea
  source 1..20: mol_type = genomic DNA
ctctttataggtttaaaaat

SEQ ID NO: 1218 - DNA, 20 bp, Arachis hypogaea
  source 1..20: mol_type = genomic DNA
tttaaaaatgggaaaatctt

SEQ ID NO: 1219 - DNA, 20 bp, Arachis hypogaea
  source 1..20: mol_type = genomic DNA
tgggaaaatctttggcagtt

SEQ ID NO: 1220 - DNA, 20 bp, Arachis hypogaea
  source 1..20: mol_type = genomic DNA
ataataatagtaatagtagc

SEQ ID NO: 1221 - DNA, 20 bp, Arachis hypogaea
  source 1..20: mol_type = genomic DNA
gctggctctattataatagc

SEQ ID NO: 1222 - DNA, 20 bp, Arachis hypogaea
  source 1..20: mol_type = genomic DNA
ggctctattataatagctgg

SEQ ID NO: 1223 - DNA, 20 bp, Arachis hypogaea
  source 1..20: mol_type = genomic DNA
actactgaccgtattagtgt

SEQ ID NO: 1224 - DNA, 20 bp, Arachis hypogaea
  source 1..20: mol_type = genomic DNA
agaagtagccaacactaata

SEQ ID NO: 1225 - DNA, 20 bp, Arachis hypogaea
  source 1..20: mol_type = genomic DNA
gaatgtaaatgtctctcttt

SEQ ID NO: 1226 - DNA, 20 bp, Arachis hypogaea
  source 1..20: mol_type = genomic DNA
aatgtaaatgtctctctttt

SEQ ID NO: 1227 - DNA, 20 bp, Arachis hypogaea
  source 1..20: mol_type = genomic DNA
atgtctctcttttgggttgc

SEQ ID NO: 1228 - DNA, 20 bp, Arachis hypogaea
  source 1..20: mol_type = genomic DNA
gttgcaggtcatgactgatc

SEQ ID NO: 1229 - DNA, 20 bp, Arachis hypogaea
  source 1..20: mol_type = genomic DNA
tcactagggccaggaacatc

SEQ ID NO: 1230 - DNA, 20 bp, Arachis hypogaea
  source 1..20: mol_type = genomic DNA
atgactgatccggatgttcc

SEQ ID NO: 1231 - DNA, 20 bp, Arachis hypogaea
  source 1..20: mol_type = genomic DNA
agataaggatcactagggcc

SEQ ID NO: 1232 - DNA, 20 bp, Arachis hypogaea
  source 1..20: mol_type = genomic DNA
ctctgagataaggatcacta

SEQ ID NO: 1233 - DNA, 20 bp, Arachis hypogaea
  source 1..20: mol_type = genomic DNA
tctctgagataaggatcact

SEQ ID NO: 1234 - DNA, 20 bp, Arachis hypogaea
  source 1..20: mol_type = genomic DNA
tgcaagtgctctctgagata

SEQ ID NO: 1235 - DNA, 20 bp, Arachis hypogaea
  source 1..20: mol_type = genomic DNA
atctcagagagcacttgcat

SEQ ID NO: 1236 - DNA, 20 bp, Arachis hypogaea
  source 1..20: mol_type = genomic DNA
ttactacatgaaaattaatt

SEQ ID NO: 1237 - DNA, 20 bp, Arachis hypogaea
  source 1..20: mol_type = genomic DNA
tactacatgaaaattaatta

SEQ ID NO: 1238 - DNA, 20 bp, Arachis hypogaea
  source 1..20: mol_type = genomic DNA
aataaacagctgttttattt

SEQ ID NO: 1239 - DNA, 20 bp, Arachis hypogaea
  source 1..20: mol_type = genomic DNA
caaacacataatgcatcatt

SEQ ID NO: 1240 - DNA, 20 bp, Arachis hypogaea
  source 1..20: mol_type = genomic DNA
cacatattatcacgattcat

SEQ ID NO: 1241 - DNA, 20 bp, Arachis hypogaea
  source 1..20: mol_type = genomic DNA
cattaatttcacatagctag

SEQ ID NO: 1242 - DNA, 20 bp, Arachis hypogaea
  source 1..20: mol_type = genomic DNA
aaattgaaatatatatctgc

SEQ ID NO: 1243 - DNA, 20 bp, Arachis hypogaea
  source 1..20: mol_type = genomic DNA
aggatagttacagacattcc

SEQ ID NO: 1244 - DNA, 20 bp, Arachis hypogaea
  source 1..20: mol_type = genomic DNA
aatgtggcatctgttgtgcc

SEQ ID NO: 1245 - DNA, 20 bp, Arachis hypogaea
  source 1..20: mol_type = genomic DNA
ggcacaacagatgccacatt

SEQ ID NO: 1246 - DNA, 20 bp, Arachis hypogaea
  source 1..20: mol_type = genomic DNA
aatgagagacctaccaaatg

SEQ ID NO: 1247 - DNA, 20 bp, Arachis hypogaea
  source 1..20: mol_type = genomic DNA
caacagatgccacatttggt

SEQ ID NO: 1248 - DNA, 20 bp, Arachis hypogaea
  source 1..20: mol_type = genomic DNA
gtgtccatagatatcaaaag

SEQ ID NO: 1249 - DNA, 20 bp, Arachis hypogaea
  source 1..20: mol_type = genomic DNA
cattcctcttttgatatcta

SEQ ID NO: 1250 - DNA, 20 bp, Arachis hypogaea
  source 1..20: mol_type = genomic DNA
tatgtttaattatttgtttt

SEQ ID NO: 1251 - DNA, 20 bp, Arachis hypogaea
  source 1..20: mol_type = genomic DNA
atgtttaattatttgtttta

SEQ ID NO: 1252 - DNA, 20 bp, Arachis hypogaea
  source 1..20: mol_type = genomic DNA
atttgttttagggaaagagt

SEQ ID NO: 1253 - DNA, 20 bp, Arachis hypogaea
  source 1..20: mol_type = genomic DNA
tggatcccaatgttaggctt

SEQ ID NO: 1254 - DNA, 20 bp, Arachis hypogaea
  source 1..20: mol_type = genomic DNA
gagatgccaaagcctaacat

SEQ ID NO: 1255 - DNA, 20 bp, Arachis hypogaea
  source 1..20: mol_type = genomic DNA
agatgccaaagcctaacatt

SEQ ID NO: 1256 - DNA, 20 bp, Arachis hypogaea
  source 1..20: mol_type = genomic DNA
tacctatggatcccaatgtt

SEQ ID NO: 1257 - DNA, 20 bp, Arachis hypogaea
  source 1..20: mol_type = genomic DNA
agcctaacattgggatccat

SEQ ID NO: 1258 - DNA, 20 bp, Arachis hypogaea
  source 1..20: mol_type = genomic DNA
agagcacaaaaacataccta

SEQ ID NO: 1259 - DNA, 20 bp, Arachis hypogaea
  source 1..20: mol_type = genomic DNA
tgctcttcaagcaaaaacga

SEQ ID NO: 1260 - DNA, 20 bp, Arachis hypogaea
  source 1..20: mol_type = genomic DNA
gtgatccctgcaagaaggaa

SEQ ID NO: 1261 - DNA, 20 bp, Arachis hypogaea
  source 1..20: mol_type = genomic DNA
ttagcaccattccttcttgc

SEQ ID NO: 1262 - DNA, 20 bp, Arachis hypogaea
  source 1..20: mol_type = genomic DNA
ttgaagtgatccctgcaaga

SEQ ID NO: 1263 - DNA, 20 bp, Arachis hypogaea
  source 1..20: mol_type = genomic DNA
tagcaccattccttcttgca

SEQ ID NO: 1264 - DNA, 20 bp, Arachis hypogaea
  source 1..20: mol_type = genomic DNA
gttatcggcggcgaaagtgc

SEQ ID NO: 1265 - DNA, 20 bp, Arachis hypogaea
  source 1..20: mol_type = genomic DNA
cgttatcggcggcgaaagtg

SEQ ID NO: 1266 - DNA, 20 bp, Arachis hypogaea
  source 1..20: mol_type = genomic DNA
gaggccgaggtcgttatcgg

SEQ ID NO: 1267 - DNA, 20 bp, Arachis hypogaea
  source 1..20: mol_type = genomic DNA
ggggaggccgaggtcgttat

SEQ ID NO: 1268 - DNA, 20 bp, Arachis hypogaea
  source 1..20: mol_type = genomic DNA
ttcgccgccgataacgacct

SEQ ID NO: 1269 - DNA, 20 bp, Arachis hypogaea
  source 1..20: mol_type = genomic DNA
cggcagcgacggggaggccg

SEQ ID NO: 1270 - DNA, 20 bp, Arachis hypogaea
  source 1..20: mol_type = genomic DNA
agtagacggcagcgacgggg

SEQ ID NO: 1271 - DNA, 20 bp, Arachis hypogaea
  source 1..20: mol_type = genomic DNA
tgaagtagacggcagcgacg

SEQ ID NO: 1272 - DNA, 20 bp, Arachis hypogaea
  source 1..20: mol_type = genomic DNA
ttgaagtagacggcagcgac

SEQ ID NO: 1273 - DNA, 20 bp, Arachis hypogaea
  source 1..20: mol_type = genomic DNA
attgaagtagacggcagcga

SEQ ID NO: 1274 - DNA, 20 bp, Arachis hypogaea
  source 1..20: mol_type = genomic DNA
cctctgagcattgaagtaga

SEQ ID NO: 1275 - DNA, 20 bp, Arachis hypogaea
  source 1..20: mol_type = genomic DNA
ccgtctacttcaatgctcag

SEQ ID NO: 1276 - DNA, 20 bp, Arachis hypogaea
  source 1..20: mol_type = genomic DNA
cgtctacttcaatgctcaga

SEQ ID NO: 1277 - DNA, 20 bp, Arachis hypogaea
  source 1..20: mol_type = genomic DNA
ctcagagggaaaccgctgcc

SEQ ID NO: 1278 - DNA, 20 bp, Arachis hypogaea
  source 1..20: mol_type = genomic DNA
taattaacgcctcctggcag

SEQ ID NO: 1279 - DNA, 20 bp, Arachis hypogaea
  source 1..20: mol_type = genomic DNA
agagggaaaccgctgccagg

SEQ ID NO: 1280 - DNA, 20 bp, Arachis hypogaea
  source 1..20: mol_type = genomic DNA
attaattaattaacgcctcc

SEQ ID NO: 1281 - DNA, 20 bp, Arachis hypogaea
  source 1..20: mol_type = genomic DNA
atttttcattcagacacact

SEQ ID NO: 1282 - DNA, 20 bp, Arachis hypogaea
  source 1..20: mol_type = genomic DNA
ttacttgtgttgcagaaaaa

SEQ ID NO: 1283 - DNA, 20 bp, Arachis hypogaea
  source 1..20: mol_type = genomic DNA
tacttgtgttgcagaaaaaa

SEQ ID NO: 1284 - DNA, 20 bp, Arachis hypogaea
  source 1..20: mol_type = genomic DNA
tatgtatgtatgtatgtaga

SEQ ID NO: 1285 - DNA, 20 bp, Arachis hypogaea
  source 1..20: mol_type = genomic DNA
atgtatgtatgtatgtagaa

SEQ ID NO: 1286 - DNA, 20 bp, Arachis hypogaea
  source 1..20: mol_type = genomic DNA
gctgtgtgttttaatttcca

SEQ ID NO: 1287 - DNA, 20 bp, Arachis hypogaea
  source 1..20: mol_type = genomic DNA
acgacatggcgtatatacca

SEQ ID NO: 1288 - DNA, 20 bp, Arachis hypogaea
  source 1..20: mol_type = genomic DNA
tatgattagatgaaacgaca

SEQ ID NO: 1289 - DNA, 20 bp, Arachis hypogaea
  source 1..20: mol_type = genomic DNA
atcataataattactacttt

SEQ ID NO: 1290 - DNA, 1751 bp, Arachis hypogaea
  source 1..1751: mol_type = genomic DNA
gaggagtggtgggagcatatgatttgtttcagccctcacatagacccaattattagaataaacaaatgatatcttagtgtgttactacacatgtattcacaaaaatgaatattaaaaacacatagctggaagattctcttgatagagacattataaatatggaactcaagtgtacttactttcctcaagctaagctagtaattgtatttgtatctctcactctttattaatttcctctatcttcttcttatttgcttgttaataagaattatattattctcctaatggcaagaataatgtcatcagagcctttaattgtagggagagtggtaggagatgttcttgatccattcaatgcaagcataaggatgagtgttagttatgggaacaggcaagtgtacaatggccatgagttcttcccctccacagtcaccttcaagcccaaggttgagataggtggaactgaattgaggcccttctttacactggttggtacctctctctctctctctctctatatatatatatatatatatatatactcctctcatctcttcttcttttgttcctttttctctttataggtttaaaaatgggaaaacctttggcagtttggctgttgttatctttatataataatagtaatagtagctcgctctattataatagctggtggttacttctacgagaatgtcttcgtgtaatgacaatatataaattattagatgattcagttaaacaagtcaaattatttaaacggttcataatatcatctttacacgaattcgttttcgtagaagtagccaacactaacacgatcagtattatgatacatatatataaatacatagaatgtaaatgtctctcttttgggttgcaggtcatgactgatccggatgttcctggccctagtgatccttatctcagagagcacttgcattggtaaaacttaattaaatttttactacatgaaaattaatcaggttaacaactaaaaccaaaataaaacagctgtttattacaaacacataatgcatcatttggtcatatgaaagagacacacacatattatcacgactcataggcatgcattaatttcacacagctagaggtgtatctagatctctaagagtcaagcaaattaaaaaaaatgaaatatttatctgcaggatagtgacagacattccaggcacaacagatgccacatttggtaggtctctcattcctcttttgatatctatggatactacaagactgagaaataataataatgttgttgatgtatgtttaattatttgttttagggaaagagttggtgagctacgagatgccaaagcctaacattgggatccataggtatgtttttgtgctcttcaagcaaaaacgaaggcagtgtgttaccaccattccttcttgcagggatcacttcaacacccgcactttcgccgccgacaacgacctcggcctccctgtcgctgccgtctacttcaatgctcagagggaaaccgctgccaggaggcgttaattaattaattaagaagtagctagagatcccagtgtgggtgaatgaaaaataatttacttgtattgcagaaaaaagggaatcatttcttttttgactatcatgtatgtatgtatgtatgtagaagggttactttttcgttatcacatatatgctgtgtgttttaatttccatggtatatacgccatgtcgtttcatctaatcataataattactactttaggatttg

SEQ ID NO: 1291 - protein, 175 aa, Arachis hypogaea
MARIMSSEPLIVGRVVGDVLDPFNASIRMSVSYGNRQVYNGHEFFPSTVTFKPKVEIGGTELRPFFTLVMTDPDVPGPSDPYLREHLHWIVTDIPGTTDATFGKELVSYEMPKPNIGIHRYVFVLFKQKRRQCVTTIPSCRDHFNTRTFAADNDLGLPVAAVYFNAQRETAARRR

SEQ ID NO: 1292 - DNA, 20 bp, Arachis hypogaea
  source 1..20: mol_type = genomic DNA
taataattgggtctatgtga

SEQ ID NO: 1293 - DNA, 20 bp, Arachis hypogaea
  source 1..20: mol_type = genomic DNA
ctaataattgggtctatgtg

SEQ ID NO: 1294 - DNA, 20 bp, Arachis hypogaea
  source 1..20: mol_type = genomic DNA
atttgtttattctaataatt

SEQ ID NO: 1295 - DNA, 20 bp, Arachis hypogaea
  source 1..20: mol_type = genomic DNA
catttgtttattctaataat

SEQ ID NO: 1296 - DNA, 20 bp, Arachis hypogaea
  source 1..20: mol_type = genomic DNA
gaatattaaaaacacatagc

SEQ ID NO: 1297 - DNA, 20 bp, Arachis hypogaea
  source 1..20: mol_type = genomic DNA
tgatagagacattataaata

SEQ ID NO: 1298 - DNA, 20 bp, Arachis hypogaea
  source 1..20: mol_type = genomic DNA
acaattactagcttagcttg

SEQ ID NO: 1299 - DNA, 20 bp, Arachis hypogaea
  source 1..20: mol_type = genomic DNA
agcaaataagaagaagatag

SEQ ID NO: 1300 - DNA, 20 bp, Arachis hypogaea
  source 1..20: mol_type = genomic DNA
gaattatattattctcctaa

SEQ ID NO: 1301 - DNA, 20 bp, Arachis hypogaea
  source 1..20: mol_type = genomic DNA
atgacattattcttgccatt

SEQ ID NO: 1302 - DNA, 20 bp, Arachis hypogaea
  source 1..20: mol_type = genomic DNA
accactctccctacaattaa

SEQ ID NO: 1303 - DNA, 20 bp, Arachis hypogaea
  source 1..20: mol_type = genomic DNA
tcatcagagcctttaattgt

SEQ ID NO: 1304 - DNA, 20 bp, Arachis hypogaea
  source 1..20: mol_type = genomic DNA
catcagagcctttaattgta

SEQ ID NO: 1305 - DNA, 20 bp, Arachis hypogaea
  source 1..20: mol_type = genomic DNA
gcctttaattgtagggagag

SEQ ID NO: 1306 - DNA, 20 bp, Arachis hypogaea
  source 1..20: mol_type = genomic DNA
ttaattgtagggagagtggt

SEQ ID NO: 1307 - DNA, 20 bp, Arachis hypogaea
  source 1..20: mol_type = genomic DNA
atccttatgcttgcattgaa

SEQ ID NO: 1308 - DNA, 20 bp, Arachis hypogaea
  source 1..20: mol_type = genomic DNA
atccattcaatgcaagcata

SEQ ID NO: 1309 - DNA, 20 bp, Arachis hypogaea
  source 1..20: mol_type = genomic DNA
ataaggatgagtgttagtta

SEQ ID NO: 1310 - DNA, 20 bp, Arachis hypogaea
  source 1..20: mol_type = genomic DNA
taaggatgagtgttagttat

SEQ ID NO: 1311 - DNA, 20 bp, Arachis hypogaea
  source 1..20: mol_type = genomic DNA
tgagtgttagttatgggaac

SEQ ID NO: 1312 - DNA, 20 bp, Arachis hypogaea
  source 1..20: mol_type = genomic DNA
gggaacaggcaagtgtacaa

SEQ ID NO: 1313 - DNA, 20 bp, Arachis hypogaea
  source 1..20: mol_type = genomic DNA
ctgtggaggggaagaactca

SEQ ID NO: 1314 - DNA, 20 bp, Arachis hypogaea
  source 1..20: mol_type = genomic DNA
gcttgaaggtgactgtggag

SEQ ID NO: 1315 - DNA, 20 bp, Arachis hypogaea
  source 1..20: mol_type = genomic DNA
ggcttgaaggtgactgtgga

SEQ ID NO: 1316 - DNA, 20 bp, Arachis hypogaea
  source 1..20: mol_type = genomic DNA
gggcttgaaggtgactgtgg

SEQ ID NO: 1317 - DNA, 20 bp, Arachis hypogaea
  source 1..20: mol_type = genomic DNA
cttgggcttgaaggtgactg

SEQ ID NO: 1318 - DNA, 20 bp, Arachis hypogaea
  source 1..20: mol_type = genomic DNA
tatctcaaccttgggcttga

SEQ ID NO: 1319 - DNA, 20 bp, Arachis hypogaea
  source 1..20: mol_type = genomic DNA
cacagtcaccttcaagccca

SEQ ID NO: 1320 - DNA, 20 bp, Arachis hypogaea
  source 1..20: mol_type = genomic DNA
gttccacctatctcaacctt

SEQ ID NO: 1321 - DNA, 20 bp, Arachis hypogaea
  source 1..20: mol_type = genomic DNA
agttccacctatctcaacct

SEQ ID NO: 1322 - DNA, 20 bp, Arachis hypogaea
  source 1..20: mol_type = genomic DNA
ttcaagcccaaggttgagat

SEQ ID NO: 1323 - DNA, 20 bp, Arachis hypogaea
  source 1..20: mol_type = genomic DNA
aagcccaaggttgagatagg

SEQ ID NO: 1324 - DNA, 20 bp, Arachis hypogaea
  source 1..20: mol_type = genomic DNA
agataggtggaactgaattg

SEQ ID NO: 1325 - DNA, 20 bp, Arachis hypogaea
  source 1..20: mol_type = genomic DNA
gtaccaaccagtgtaaagaa

SEQ ID NO: 1326 - DNA, 20 bp, Arachis hypogaea
  source 1..20: mol_type = genomic DNA
ggtaccaaccagtgtaaaga

SEQ ID NO: 1327 - DNA, 20 bp, Arachis hypogaea
  source 1..20: mol_type = genomic DNA
attgaggcccttctttacac

SEQ ID NO: 1328 - DNA, 20 bp, Arachis hypogaea
  source 1..20: mol_type = genomic DNA
aggcccttctttacactggt

SEQ ID NO: 1329 - DNA, 20 bp, Arachis hypogaea
  source 1..20: mol_type = genomic DNA
atagagagagagagagagag

SEQ ID NO: 1330 - DNA, 20 bp, Arachis hypogaea
  source 1..20: mol_type = genomic DNA
acaaaagaagaagagatgag

SEQ ID NO: 1331 - DNA, 20 bp, Arachis hypogaea
  source 1..20: mol_type = genomic DNA
ttaaacctataaagagaaaa

SEQ ID NO: 1332 - DNA, 20 bp, Arachis hypogaea
  source 1..20: mol_type = genomic DNA
ttgttcctttttctctttat

SEQ ID NO: 1333 - DNA, 20 bp, Arachis hypogaea
  source 1..20: mol_type = genomic DNA
tctctttataggtttaaaaa

SEQ ID NO: 1334 - DNA, 20 bp, Arachis hypogaea
  source 1..20: mol_type = genomic DNA
ctctttataggtttaaaaat

SEQ ID NO: 1335 - DNA, 20 bp, Arachis hypogaea
  source 1..20: mol_type = genomic DNA
tttaaaaatgggaaaacctt

SEQ ID NO: 1336 - DNA, 20 bp, Arachis hypogaea
  source 1..20: mol_type = genomic DNA
aacaacagccaaactgccaa

SEQ ID NO: 1337 - DNA, 20 bp, Arachis hypogaea
  source 1..20: mol_type = genomic DNA
tgggaaaacctttggcagtt

SEQ ID NO: 1338 - DNA, 20 bp, Arachis hypogaea
  source 1..20: mol_type = genomic DNA
gctcgctctattataatagc

SEQ ID NO: 1339 - DNA, 20 bp, Arachis hypogaea
  source 1..20: mol_type = genomic DNA
cgctctattataatagctgg

SEQ ID NO: 1340 - DNA, 20 bp, Arachis hypogaea
  source 1..20: mol_type = genomic DNA
aacaagtcaaattatttaaa

SEQ ID NO: 1341 - DNA, 20 bp, Arachis hypogaea
  source 1..20: mol_type = genomic DNA
aatactgatcgtgttagtgt

SEQ ID NO: 1342 - DNA, 20 bp, Arachis hypogaea
  source 1..20: mol_type = genomic DNA
gaatgtaaatgtctctcttt

SEQ ID NO: 1343 - DNA, 20 bp, Arachis hypogaea
  source 1..20: mol_type = genomic DNA
aatgtaaatgtctctctttt

SEQ ID NO: 1344 - DNA, 20 bp, Arachis hypogaea
  source 1..20: mol_type = genomic DNA
atgtctctcttttgggttgc

SEQ ID NO: 1345 - DNA, 20 bp, Arachis hypogaea
  source 1..20: mol_type = genomic DNA
gttgcaggtcatgactgatc

SEQ ID NO: 1346 - DNA, 20 bp, Arachis hypogaea
  source 1..20: mol_type = genomic DNA
tcactagggccaggaacatc

SEQ ID NO: 1347 - DNA, 20 bp, Arachis hypogaea
  source 1..20: mol_type = genomic DNA
atgactgatccggatgttcc

SEQ ID NO: 1348 - DNA, 20 bp, Arachis hypogaea
  source 1..20: mol_type = genomic DNA
agataaggatcactagggcc

SEQ ID NO: 1349 - DNA, 20 bp, Arachis hypogaea
  source 1..20: mol_type = genomic DNA
ctctgagataaggatcacta

SEQ ID NO: 1350 - DNA, 20 bp, Arachis hypogaea
  source 1..20: mol_type = genomic DNA
tctctgagataaggatcact

SEQ ID NO: 1351 - DNA, 20 bp, Arachis hypogaea
  source 1..20: mol_type = genomic DNA
tgcaagtgctctctgagata

SEQ ID NO: 1352 - DNA, 20 bp, Arachis hypogaea
  source 1..20: mol_type = genomic DNA
atctcagagagcacttgcat

SEQ ID NO: 1353 - DNA, 20 bp, Arachis hypogaea
  source 1..20: mol_type = genomic DNA
ttactacatgaaaattaatc

SEQ ID NO: 1354 - DNA, 20 bp, Arachis hypogaea
  source 1..20: mol_type = genomic DNA
aataaacagctgttttattt

SEQ ID NO: 1355 - DNA, 20 bp, Arachis hypogaea
  source 1..20: mol_type = genomic DNA
caaacacataatgcatcatt

SEQ ID NO: 1356 - DNA, 20 bp, Arachis hypogaea
  source 1..20: mol_type = genomic DNA
cacatattatcacgactcat

SEQ ID NO: 1357 - DNA, 20 bp, Arachis hypogaea
  source 1..20: mol_type = genomic DNA
cattaatttcacacagctag

SEQ ID NO: 1358 - DNA, 20 bp, Arachis hypogaea
  source 1..20: mol_type = genomic DNA
aaaatgaaatatttatctgc

SEQ ID NO: 1359 - DNA, 20 bp, Arachis hypogaea
  source 1..20: mol_type = genomic DNA
aggatagtgacagacattcc

SEQ ID NO: 1360 - DNA, 20 bp, Arachis hypogaea
  source 1..20: mol_type = genomic DNA
aatgtggcatctgttgtgcc

SEQ ID NO: 1361 - DNA, 20 bp, Arachis hypogaea
  source 1..20: mol_type = genomic DNA
ggcacaacagatgccacatt

SEQ ID NO: 1362 - DNA, 20 bp, Arachis hypogaea
  source 1..20: mol_type = genomic DNA
aatgagagacctaccaaatg

SEQ ID NO: 1363 - DNA, 20 bp, Arachis hypogaea
  source 1..20: mol_type = genomic DNA
caacagatgccacatttggt

SEQ ID NO: 1364 - DNA, 20 bp, Arachis hypogaea
  source 1..20: mol_type = genomic DNA
gtatccatagatatcaaaag

SEQ ID NO: 1365 - DNA, 20 bp, Arachis hypogaea
  source 1..20: mol_type = genomic DNA
cattcctcttttgatatcta

SEQ ID NO: 1366 - DNA, 20 bp, Arachis hypogaea
  source 1..20: mol_type = genomic DNA
tatgtttaattatttgtttt

SEQ ID NO: 1367 - DNA, 20 bp, Arachis hypogaea
  source 1..20: mol_type = genomic DNA
atgtttaattatttgtttta

SEQ ID NO: 1368 - DNA, 20 bp, Arachis hypogaea
  source 1..20: mol_type = genomic DNA
atttgttttagggaaagagt

SEQ ID NO: 1369 - DNA, 20 bp, Arachis hypogaea
  source 1..20: mol_type = genomic DNA
tggatcccaatgttaggctt

SEQ ID NO: 1370 - DNA, 20 bp, Arachis hypogaea
  source 1..20: mol_type = genomic DNA
gagatgccaaagcctaacat

SEQ ID NO: 1371 - DNA, 20 bp, Arachis hypogaea
  source 1..20: mol_type = genomic DNA
agatgccaaagcctaacatt

SEQ ID NO: 1372 - DNA, 20 bp, Arachis hypogaea
  source 1..20: mol_type = genomic DNA
tacctatggatcccaatgtt

SEQ ID NO: 1373 - DNA, 20 bp, Arachis hypogaea
  source 1..20: mol_type = genomic DNA
agcctaacattgggatccat

SEQ ID NO: 1374 - DNA, 20 bp, Arachis hypogaea
  source 1..20: mol_type = genomic DNA
agagcacaaaaacataccta

SEQ ID NO: 1375 - DNA, 20 bp, Arachis hypogaea
  source 1..20: mol_type = genomic DNA
tgctcttcaagcaaaaacga

SEQ ID NO: 1376 - DNA, 20 bp, Arachis hypogaea
  source 1..20: mol_type = genomic DNA
atccctgcaagaaggaatgg

SEQ ID NO: 1377 - DNA, 20 bp, Arachis hypogaea
  source 1..20: mol_type = genomic DNA
gtgatccctgcaagaaggaa

SEQ ID NO: 1378 - DNA, 20 bp, Arachis hypogaea
  source 1..20: mol_type = genomic DNA
ttaccaccattccttcttgc

SEQ ID NO: 1379 - DNA, 20 bp, Arachis hypogaea
  source 1..20: mol_type = genomic DNA
ttgaagtgatccctgcaaga

SEQ ID NO: 1380 - DNA, 20 bp, Arachis hypogaea
  source 1..20: mol_type = genomic DNA
taccaccattccttcttgca

SEQ ID NO: 1381 - DNA, 20 bp, Arachis hypogaea
  source 1..20: mol_type = genomic DNA
gttgtcggcggcgaaagtgc

SEQ ID NO: 1382 - DNA, 20 bp, Arachis hypogaea
  source 1..20: mol_type = genomic DNA
cgttgtcggcggcgaaagtg

SEQ ID NO: 1383 - DNA, 20 bp, Arachis hypogaea
  source 1..20: mol_type = genomic DNA
gaggccgaggtcgttgtcgg

SEQ ID NO: 1384 - DNA, 20 bp, Arachis hypogaea
  source 1..20: mol_type = genomic DNA
agggaggccgaggtcgttgt

SEQ ID NO: 1385 - DNA, 20 bp, Arachis hypogaea
  source 1..20: mol_type = genomic DNA
ttcgccgccgacaacgacct

SEQ ID NO: 1386 - DNA, 20 bp, Arachis hypogaea
  source 1..20: mol_type = genomic DNA
cggcagcgacagggaggccg

SEQ ID NO: 1387 - DNA, 20 bp, Arachis hypogaea
  source 1..20: mol_type = genomic DNA
agtagacggcagcgacaggg

SEQ ID NO: 1388 - DNA, 20 bp, Arachis hypogaea
  source 1..20: mol_type = genomic DNA
tgaagtagacggcagcgaca

SEQ ID NO: 1389 - DNA, 20 bp, Arachis hypogaea
  source 1..20: mol_type = genomic DNA
ttgaagtagacggcagcgac

SEQ ID NO: 1390 - DNA, 20 bp, Arachis hypogaea
  source 1..20: mol_type = genomic DNA
cctctgagcattgaagtaga

SEQ ID NO: 1391 - DNA, 20 bp, Arachis hypogaea
  source 1..20: mol_type = genomic DNA
ccgtctacttcaatgctcag

SEQ ID NO: 1392 - DNA, 20 bp, Arachis hypogaea
  source 1..20: mol_type = genomic DNA
cgtctacttcaatgctcaga

SEQ ID NO: 1393 - DNA, 20 bp, Arachis hypogaea
  source 1..20: mol_type = genomic DNA
ctcagagggaaaccgctgcc

SEQ ID NO: 1394 - DNA, 20 bp, Arachis hypogaea
  source 1..20: mol_type = genomic DNA
taattaacgcctcctggcag

SEQ ID NO: 1395 - DNA, 20 bp, Arachis hypogaea
  source 1..20: mol_type = genomic DNA
agagggaaaccgctgccagg

SEQ ID NO: 1396 - DNA, 20 bp, Arachis hypogaea
  source 1..20: mol_type = genomic DNA
attaattaattaacgcctcc

SEQ ID NO: 1397 - DNA, 20 bp, Arachis hypogaea
  source 1..20: mol_type = genomic DNA
agtagctagagatcccagtg

SEQ ID NO: 1398 - DNA, 20 bp, Arachis hypogaea
  source 1..20: mol_type = genomic DNA
gtagctagagatcccagtgt

SEQ ID NO: 1399 - DNA, 20 bp, Arachis hypogaea
  source 1..20: mol_type = genomic DNA
atttttcattcacccacact

SEQ ID NO: 1400 - DNA, 20 bp, Arachis hypogaea
  source 1..20: mol_type = genomic DNA
tatttttcattcacccacac

SEQ ID NO: 1401 - DNA, 20 bp, Arachis hypogaea
  source 1..20: mol_type = genomic DNA
ttacttgtattgcagaaaaa

SEQ ID NO: 1402 - DNA, 20 bp, Arachis hypogaea
  source 1..20: mol_type = genomic DNA
tacttgtattgcagaaaaaa

SEQ ID NO: 1403 - DNA, 20 bp, Arachis hypogaea
  source 1..20: mol_type = genomic DNA
tatgtatgtatgtatgtaga

SEQ ID NO: 1404 - DNA, 20 bp, Arachis hypogaea
  source 1..20: mol_type = genomic DNA
atgtatgtatgtatgtagaa

SEQ ID NO: 1405 - DNA, 20 bp, Arachis hypogaea
  source 1..20: mol_type = genomic DNA
gctgtgtgttttaatttcca

SEQ ID NO: 1406 - DNA, 20 bp, Arachis hypogaea
  source 1..20: mol_type = genomic DNA
acgacatggcgtatatacca

SEQ ID NO: 1407 - DNA, 20 bp, Arachis hypogaea
  source 1..20: mol_type = genomic DNA
tatgattagatgaaacgaca

SEQ ID NO: 1408 - DNA, 20 bp, Arachis hypogaea
  source 1..20: mol_type = genomic DNA
atcataataattactacttt

SEQ ID NO: 1409 - DNA, 2439 bp, Arachis hypogaea
  source 1..2439: mol_type = genomic DNA
aacaacaaacaaaattcacttcatattcttcttcttctctttcattctctttaacaatggcaaagatgtcatcttcagatcctttagttcttggaagagtggttggagatgtcatccactctttcaatccaagtgttcaaatgtctgtcacttacaacaccaaacaagtcttcaatggccatgagttcttcccttctgctcttaccactaggcctaaggttgccattgatggtggtgacatgaggactttttacacactggtaataatttcattattcatacatatatatatatattatttgttataatagaagagaggcaaaaaataattaataaataatattatggtagatattaaaaaaaaaataagggtgatcattgttgatgattgtgagtttgcttttttttttcctatttaattttacactagatcaattttacttacaagatttcactactatttaatttgttgatcctttttctctcccaaaaaagggggaaaaacaaaaccctaggggttagttcttacaaaatttggagctatttgagaaaaattaatgtatcctcttgtttcttttgtagatcatgacagatcctgatgttcctggcccaagtgatccttatctgagagaacatttgcactggtaacttgatatatatgattgaatttgaacctaggttttttattttttttttattttatttttttctagtaaaattaggtttaattatataactttcatgtaatacaaaagaaaaatgtctgtttcatcatatatactaaaagttgaccttcaaaaacaaattatgagaagagaaatagtgacaataatcttatgattaatacatgaactttggtaaagttatactaaacctttttttggctctcaaatctaactagtgtatttagaacttattagccttttcacttttgaatacaaattttcttaatttaattaaagcattagctatagataaatccccaatatgtttaatttatccactaaaaatagtgatatcacatgaactatcttataattaagaagaagcctttttcccctctcttacacacacactctcttttttttcctcctaatattcacattttaaacaaatactaatataattcttgtacaattattgtaaatacatatacttggtatattacctctaacatatatatctatttatagcaattatacaaaaaattatacacaataattaattatttatataacatttttgcacattttaatacacaaaaaataattaagtgtagatagagaggcttctgatctaacagtctactcttaattggttgcttttgcaggatggttacagacattcctggcacaacagatgccacatttggtaggtttcattgattcatagatctaattaaaatacaccatatatgtgttattctgtgttattcatttctatatataattcaaattgacctaccttattattattaagtgaaaatgttttatacattatatagactacccaactatcaaatgactatactaattttttttttatgtatctttcaaaaataaaatagttacaccaaatatttgcatgaactgaagtctagaatttagttcatattgtactatattatgaatacaattactaaaattatctactaataaaatgacaaagattcacatgtagttatttttatgtcaattatagttaatagttaaaaatcgttaaataataatttagttaaattaatggttcttaaatattaacatcatgtgagtttttaccggataaaatatatatatttatatataaatacatagtgactgattttaataattaatatatgtctgataagtaataaaaaagataaatgaataatagtaacaattttgtttgatgtaaaatggaagggaaagagatagtgagctatgaaagccctaagccacagatagggatacacaggtatgtgtttgtgttgttgaagcaaaagagaaggcagagtgtaaccccaccaagttcaagggatcacttcaacactatcaacttctctgctcactctgacctttctcttcctgttgctgctgtctacttcaatgctcagagagaaaccgccgctagaagacgctaattcatatatatgtagctgcatgcacacctatatatatatatatttattattagtaaataaagcaagaagcatgcgagcaaggttaggttatggctatatatcatcatcatcatcatgaagaatgaaaagggtatggcacgtggcttcttctcataggtggtgttaatcttggatatatagtttaggtgtcacttattattatatcatgtatgtggctaattaatgtattgtgttagttgtatgtgttgtttgtgagttatgtaatataatgttatgaacttgagaattaagaataaataaatatctttttattacta

SEQ ID NO: 1410 - protein, 174 aa, Arachis hypogaea
MAKMSSSDPLVLGRVVGDVIHSFNPSVQMSVTYNTKQVFNGHEFFPSALTTRPKVAIDGGDMRTFYTLIMTDPDVPGPSDPYLREHLHWMVTDIPGTTDATFGKEIVSYESPKPQIGIHRYVFVLLKQKRRQSVTPPSSRDHFNTINFSAHSDLSLPVAAVYFNAQRETAARRR

SEQ ID NO: 1411 - DNA, 20 bp, Arachis hypogaea
  source 1..20: mol_type = genomic DNA
tctttcattctctttaacaa

SEQ ID NO: 1412 - DNA, 20 bp, Arachis hypogaea
  source 1..20: mol_type = genomic DNA
accactcttccaagaactaa

SEQ ID NO: 1413 - DNA, 20 bp, Arachis hypogaea
  source 1..20: mol_type = genomic DNA
tcttcagatcctttagttct

SEQ ID NO: 1414 - DNA, 20 bp, Arachis hypogaea
  source 1..20: mol_type = genomic DNA
tcctttagttcttggaagag

SEQ ID NO: 1415 - DNA, 20 bp, Arachis hypogaea
  source 1..20: mol_type = genomic DNA
ttagttcttggaagagtggt

SEQ ID NO: 1416 - DNA, 20 bp, Arachis hypogaea
  source 1..20: mol_type = genomic DNA
gaacacttggattgaaagag

SEQ ID NO: 1417 - DNA, 20 bp, Arachis hypogaea
  source 1..20: mol_type = genomic DNA
gtgacagacatttgaacact

SEQ ID NO: 1418 - DNA, 20 bp, Arachis hypogaea
  source 1..20: mol_type = genomic DNA
atggccattgaagacttgtt

SEQ ID NO: 1419 - DNA, 20 bp, Arachis hypogaea
  source 1..20: mol_type = genomic DNA
aacaccaaacaagtcttcaa

SEQ ID NO: 1420 - DNA, 20 bp, Arachis hypogaea
  source 1..20: mol_type = genomic DNA
gagcagaagggaagaactca

SEQ ID NO: 1421 - DNA, 20 bp, Arachis hypogaea
  source 1..20: mol_type = genomic DNA
gcctagtggtaagagcagaa

SEQ ID NO: 1422 - DNA, 20 bp, Arachis hypogaea
  source 1..20: mol_type = genomic DNA
ggcctagtggtaagagcaga

SEQ ID NO: 1423 - DNA, 20 bp, Arachis hypogaea
  source 1..20: mol_type = genomic DNA
tcccttctgctcttaccact

SEQ ID NO: 1424 - DNA, 20 bp, Arachis hypogaea
  source 1..20: mol_type = genomic DNA
aatggcaaccttaggcctag

SEQ ID NO: 1425 - DNA, 20 bp, Arachis hypogaea
  source 1..20: mol_type = genomic DNA
tgctcttaccactaggccta

SEQ ID NO: 1426 - DNA, 20 bp, Arachis hypogaea
  source 1..20: mol_type = genomic DNA
ccaccatcaatggcaacctt

SEQ ID NO: 1427 - DNA, 20 bp, Arachis hypogaea
  source 1..20: mol_type = genomic DNA
aggcctaaggttgccattga

SEQ ID NO: 1428 - DNA, 20 bp, Arachis hypogaea
  source 1..20: mol_type = genomic DNA
cctcatgtcaccaccatcaa

SEQ ID NO: 1429 - DNA, 20 bp, Arachis hypogaea
  source 1..20: mol_type = genomic DNA
cctaaggttgccattgatgg

SEQ ID NO: 1430 - DNA, 20 bp, Arachis hypogaea
  source 1..20: mol_type = genomic DNA
ccattgatggtggtgacatg

SEQ ID NO: 1431 - DNA, 20 bp, Arachis hypogaea
  source 1..20: mol_type = genomic DNA
catgaggactttttacacac

SEQ ID NO: 1432 - DNA, 20 bp, Arachis hypogaea
  source 1..20: mol_type = genomic DNA
tatttgttataatagaagag

SEQ ID NO: 1433 - DNA, 20 bp, Arachis hypogaea
  source 1..20: mol_type = genomic DNA
ataattaataaataatatta

SEQ ID NO: 1434 - DNA, 20 bp, Arachis hypogaea
  source 1..20: mol_type = genomic DNA
tagatattaaaaaaaaaata

SEQ ID NO: 1435 - DNA, 20 bp, Arachis hypogaea
  source 1..20: mol_type = genomic DNA
agatattaaaaaaaaaataa

SEQ ID NO: 1436 - DNA, 20 bp, Arachis hypogaea
  source 1..20: mol_type = genomic DNA
gatctagtgtaaaattaaat

SEQ ID NO: 1437 - DNA, 20 bp, Arachis hypogaea
  source 1..20: mol_type = genomic DNA
cccttttttgggagagaaaa

SEQ ID NO: 1438 - DNA, 20 bp, Arachis hypogaea
  source 1..20: mol_type = genomic DNA
tcctttttctctcccaaaaa

SEQ ID NO: 1439 - DNA, 20 bp, Arachis hypogaea
  source 1..20: mol_type = genomic DNA
cctttttctctcccaaaaaa

SEQ ID NO: 1440 - DNA, 20 bp, Arachis hypogaea
  source 1..20: mol_type = genomic DNA
tttgtttttccccctttttt

SEQ ID NO: 1441 - DNA, 20 bp, Arachis hypogaea
  source 1..20: mol_type = genomic DNA
ctttttctctcccaaaaaag

SEQ ID NO: 1442 - DNA, 20 bp, Arachis hypogaea
  source 1..20: mol_type = genomic DNA
ttttgtttttcccccttttt

SEQ ID NO: 1443 - DNA, 20 bp, Arachis hypogaea
  source 1..20: mol_type = genomic DNA
tttttctctcccaaaaaagg

SEQ ID NO: 1444 - DNA, 20 bp, Arachis hypogaea
  source 1..20: mol_type = genomic DNA
agggggaaaaacaaaaccct

SEQ ID NO: 1445 - DNA, 20 bp, Arachis hypogaea
  source 1..20: mol_type = genomic DNA
gggggaaaaacaaaacccta

SEQ ID NO: 1446 - DNA, 20 bp, Arachis hypogaea
  source 1..20: mol_type = genomic DNA
ggggaaaaacaaaaccctag

SEQ ID NO: 1447 - DNA, 20 bp, Arachis hypogaea
  source 1..20: mol_type = genomic DNA
tttgtaagaactaaccccta

SEQ ID NO: 1448 - DNA, 20 bp, Arachis hypogaea
  source 1..20: mol_type = genomic DNA
ttttgtaagaactaacccct

SEQ ID NO: 1449 - DNA, 20 bp, Arachis hypogaea
  source 1..20: mol_type = genomic DNA
gggttagttcttacaaaatt

SEQ ID NO: 1450 - DNA, 20 bp, Arachis hypogaea
  source 1..20: mol_type = genomic DNA
tgatctacaaaagaaacaag

SEQ ID NO: 1451 - DNA, 20 bp, Arachis hypogaea
  source 1..20: mol_type = genomic DNA
tcacttgggccaggaacatc

SEQ ID NO: 1452 - DNA, 20 bp, Arachis hypogaea
  source 1..20: mol_type = genomic DNA
atgacagatcctgatgttcc

SEQ ID NO: 1453 - DNA, 20 bp, Arachis hypogaea
  source 1..20: mol_type = genomic DNA
agataaggatcacttgggcc

SEQ ID NO: 1454 - DNA, 20 bp, Arachis hypogaea
  source 1..20: mol_type = genomic DNA
ctctcagataaggatcactt

SEQ ID NO: 1455 - DNA, 20 bp, Arachis hypogaea
  source 1..20: mol_type = genomic DNA
tctctcagataaggatcact

SEQ ID NO: 1456 - DNA, 20 bp, Arachis hypogaea
  source 1..20: mol_type = genomic DNA
tgcaaatgttctctcagata

SEQ ID NO: 1457 - DNA, 20 bp, Arachis hypogaea
  source 1..20: mol_type = genomic DNA
atctgagagaacatttgcac

SEQ ID NO: 1458 - DNA, 20 bp, Arachis hypogaea
  source 1..20: mol_type = genomic DNA
atatgattgaatttgaacct

SEQ ID NO: 1459 - DNA, 20 bp, Arachis hypogaea
  source 1..20: mol_type = genomic DNA
aaaaaaaaaataaaaaacct

SEQ ID NO: 1460 - DNA, 20 bp, Arachis hypogaea
  source 1..20: mol_type = genomic DNA
tatttttttctagtaaaatt

SEQ ID NO: 1461 - DNA, 20 bp, Arachis hypogaea
  source 1..20: mol_type = genomic DNA
ttctcataatttgtttttga

SEQ ID NO: 1462 - DNA, 20 bp, Arachis hypogaea
  source 1..20: mol_type = genomic DNA
tatgattaatacatgaactt

SEQ ID NO: 1463 - DNA, 20 bp, Arachis hypogaea
  source 1..20: mol_type = genomic DNA
agttatactaaacctttttt

SEQ ID NO: 1464 - DNA, 20 bp, Arachis hypogaea
  source 1..20: mol_type = genomic DNA
tagatttgagagccaaaaaa

SEQ ID NO: 1465 - DNA, 20 bp, Arachis hypogaea
  source 1..20: mol_type = genomic DNA
atttgtattcaaaagtgaaa

SEQ ID NO: 1466 - DNA, 20 bp, Arachis hypogaea
  source 1..20: mol_type = genomic DNA
tggataaattaaacatattg

SEQ ID NO: 1467 - DNA, 20 bp, Arachis hypogaea
  source 1..20: mol_type = genomic DNA
gtggataaattaaacatatt

SEQ ID NO: 1468 - DNA, 20 bp, Arachis hypogaea
  source 1..20: mol_type = genomic DNA
agtggataaattaaacatat

SEQ ID NO: 1469 - DNA, 20 bp, Arachis hypogaea
  source 1..20: mol_type = genomic DNA
tgtgatatcactatttttag

SEQ ID NO: 1470 - DNA, 20 bp, Arachis hypogaea
  source 1..20: mol_type = genomic DNA
gtgtgtaagagaggggaaaa

SEQ ID NO: 1471 - DNA, 20 bp, Arachis hypogaea
  source 1..20: mol_type = genomic DNA
agagtgtgtgtgtaagagag

SEQ ID NO: 1472 - DNA, 20 bp, Arachis hypogaea
  source 1..20: mol_type = genomic DNA
gagagtgtgtgtgtaagaga

SEQ ID NO: 1473 - DNA, 20 bp, Arachis hypogaea
  source 1..20: mol_type = genomic DNA
agagagtgtgtgtgtaagag

SEQ ID NO: 1474 - DNA, 20 bp, Arachis hypogaea
  source 1..20: mol_type = genomic DNA
tttaaaatgtgaatattagg

SEQ ID NO: 1475 - DNA, 20 bp, Arachis hypogaea
  source 1..20: mol_type = genomic DNA
ttgtttaaaatgtgaatatt

SEQ ID NO: 1476 - DNA, 20 bp, Arachis hypogaea
  source 1..20: mol_type = genomic DNA
ttattgtaaatacatatact

SEQ ID NO: 1477 - DNA, 20 bp, Arachis hypogaea
  source 1..20: mol_type = genomic DNA
taaatagatatatatgttag

SEQ ID NO: 1478 - DNA, 20 bp, Arachis hypogaea
  source 1..20: mol_type = genomic DNA
ataattaagtgtagatagag

SEQ ID NO: 1479 - DNA, 20 bp, Arachis hypogaea
  source 1..20: mol_type = genomic DNA
tctaacagtctactcttaat

SEQ ID NO: 1480 - DNA, 20 bp, Arachis hypogaea
  source 1..20: mol_type = genomic DNA
tcttaattggttgcttttgc

SEQ ID NO: 1481 - DNA, 20 bp, Arachis hypogaea
  source 1..20: mol_type = genomic DNA
aattggttgcttttgcagga

SEQ ID NO: 1482 - DNA, 20 bp, Arachis hypogaea
  source 1..20: mol_type = genomic DNA
aggatggttacagacattcc

SEQ ID NO: 1483 - DNA, 20 bp, Arachis hypogaea
  source 1..20: mol_type = genomic DNA
aatgtggcatctgttgtgcc

SEQ ID NO: 1484 - DNA, 20 bp, Arachis hypogaea
  source 1..20: mol_type = genomic DNA
ggcacaacagatgccacatt

SEQ ID NO: 1485 - DNA, 20 bp, Arachis hypogaea
  source 1..20: mol_type = genomic DNA
tcaatgaaacctaccaaatg

SEQ ID NO: 1486 - DNA, 20 bp, Arachis hypogaea
  source 1..20: mol_type = genomic DNA
caacagatgccacatttggt

SEQ ID NO: 1487 - DNA, 20 bp, Arachis hypogaea
  source 1..20: mol_type = genomic DNA
aacacagaataacacatata

SEQ ID NO: 1488 - DNA, 20 bp, Arachis hypogaea
  source 1..20: mol_type = genomic DNA
tcacttaataataataaggt

SEQ ID NO: 1489 - DNA, 20 bp, Arachis hypogaea
  source 1..20: mol_type = genomic DNA
attttcacttaataataata

SEQ ID NO: 1490 - DNA, 20 bp, Arachis hypogaea
  source 1..20: mol_type = genomic DNA
agtatagtcatttgatagtt

SEQ ID NO: 1491 - DNA, 20 bp, Arachis hypogaea
  source 1..20: mol_type = genomic DNA
tagtatagtcatttgatagt

SEQ ID NO: 1492 - DNA, 20 bp, Arachis hypogaea
  source 1..20: mol_type = genomic DNA
cttcagttcatgcaaatatt

SEQ ID NO: 1493 - DNA, 20 bp, Arachis hypogaea
  source 1..20: mol_type = genomic DNA
taataatttagttaaattaa

SEQ ID NO: 1494 - DNA, 20 bp, Arachis hypogaea
  source 1..20: mol_type = genomic DNA
aacatcatgtgagtttttac

SEQ ID NO: 1495 - DNA, 20 bp, Arachis hypogaea
  source 1..20: mol_type = genomic DNA
ataaatatatatattttatc

SEQ ID NO: 1496 - DNA, 20 bp, Arachis hypogaea
  source 1..20: mol_type = genomic DNA
caattttgtttgatgtaaaa

SEQ ID NO: 1497 - DNA, 20 bp, Arachis hypogaea
  source 1..20: mol_type = genomic DNA
tttgtttgatgtaaaatgga

SEQ ID NO: 1498 - DNA, 20 bp, Arachis hypogaea
  source 1..20: mol_type = genomic DNA
ttgtttgatgtaaaatggaa

SEQ ID NO: 1499 - DNA, 20 bp, Arachis hypogaea
  source 1..20: mol_type = genomic DNA
gtatccctatctgtggctta

SEQ ID NO: 1500 - DNA, 20 bp, Arachis hypogaea
  source 1..20: mol_type = genomic DNA
tgtatccctatctgtggctt

SEQ ID NO: 1501 - DNA, 20 bp, Arachis hypogaea
  source 1..20: mol_type = genomic DNA
gaaagccctaagccacagat

SEQ ID NO: 1502 - DNA, 20 bp, Arachis hypogaea
  source 1..20: mol_type = genomic DNA
aaagccctaagccacagata

SEQ ID NO: 1503 - DNA, 20 bp, Arachis hypogaea
  source 1..20: mol_type = genomic DNA
tacctgtgtatccctatctg

SEQ ID NO: 1504 - DNA, 20 bp, Arachis hypogaea
  source 1..20: mol_type = genomic DNA
agccacagatagggatacac

SEQ ID NO: 1505 - DNA, 20 bp, Arachis hypogaea
  source 1..20: mol_type = genomic DNA
tgttgttgaagcaaaagaga

SEQ ID NO: 1506 - DNA, 20 bp, Arachis hypogaea
  source 1..20: mol_type = genomic DNA
gtgatcccttgaacttggtg

SEQ ID NO: 1507 - DNA, 20 bp, Arachis hypogaea
  source 1..20: mol_type = genomic DNA
agtgatcccttgaacttggt

SEQ ID NO: 1508 - DNA, 20 bp, Arachis hypogaea
  source 1..20: mol_type = genomic DNA
aagtgatcccttgaacttgg

SEQ ID NO: 1509 - DNA, 20 bp, Arachis hypogaea
  source 1..20: mol_type = genomic DNA
gtgtaaccccaccaagttca

SEQ ID NO: 1510 - DNA, 20 bp, Arachis hypogaea
  source 1..20: mol_type = genomic DNA
ttgaagtgatcccttgaact

SEQ ID NO: 1511 - DNA, 20 bp, Arachis hypogaea
  source 1..20: mol_type = genomic DNA
tgtaaccccaccaagttcaa

SEQ ID NO: 1512 - DNA, 20 bp, Arachis hypogaea
  source 1..20: mol_type = genomic DNA
cagcagcaacaggaagagaa

SEQ ID NO: 1513 - DNA, 20 bp, Arachis hypogaea
  source 1..20: mol_type = genomic DNA
ttgaagtagacagcagcaac

SEQ ID NO: 1514 - DNA, 20 bp, Arachis hypogaea
  source 1..20: mol_type = genomic DNA
gaattagcgtcttctagcgg

SEQ ID NO: 1515 - DNA, 20 bp, Arachis hypogaea
  source 1..20: mol_type = genomic DNA
tatgaattagcgtcttctag

SEQ ID NO: 1516 - DNA, 20 bp, Arachis hypogaea
  source 1..20: mol_type = genomic DNA
taataaatatatatatatat

SEQ ID NO: 1517 - DNA, 20 bp, Arachis hypogaea
  source 1..20: mol_type = genomic DNA
aagcaagaagcatgcgagca

SEQ ID NO: 1518 - DNA, 20 bp, Arachis hypogaea
  source 1..20: mol_type = genomic DNA
agaagcatgcgagcaaggtt

SEQ ID NO: 1519 - DNA, 20 bp, Arachis hypogaea
  source 1..20: mol_type = genomic DNA
atgcgagcaaggttaggtta

SEQ ID NO: 1520 - DNA, 20 bp, Arachis hypogaea
  source 1..20: mol_type = genomic DNA
catcatcatgaagaatgaaa

SEQ ID NO: 1521 - DNA, 20 bp, Arachis hypogaea
  source 1..20: mol_type = genomic DNA
atcatcatgaagaatgaaaa

SEQ ID NO: 1522 - DNA, 20 bp, Arachis hypogaea
  source 1..20: mol_type = genomic DNA
catgaagaatgaaaagggta

SEQ ID NO: 1523 - DNA, 20 bp, Arachis hypogaea
  source 1..20: mol_type = genomic DNA
aatgaaaagggtatggcacg

SEQ ID NO: 1524 - DNA, 20 bp, Arachis hypogaea
  source 1..20: mol_type = genomic DNA
ggcacgtggcttcttctcat

SEQ ID NO: 1525 - DNA, 20 bp, Arachis hypogaea
  source 1..20: mol_type = genomic DNA
acgtggcttcttctcatagg

SEQ ID NO: 1526 - DNA, 20 bp, Arachis hypogaea
  source 1..20: mol_type = genomic DNA
ctcataggtggtgttaatct

SEQ ID NO: 1527 - DNA, 20 bp, Arachis hypogaea
  source 1..20: mol_type = genomic DNA
taatcttggatatatagttt

SEQ ID NO: 1528 - DNA, 20 bp, Arachis hypogaea
  source 1..20: mol_type = genomic DNA
ttattattatatcatgtatg

SEQ ID NO: 1529 - DNA, 1689 bp, Arachis hypogaea
  source 1..1689: mol_type = genomic DNA
ctagcgtgcgtgtaagaaagaacacaaattacatacctaaaaaacacatgtcctttccttaaatagaaaagcccttagatctttgctccatggaatctttctttgtgctttatgtggctatatatatgcattgaggaataggatttggtttccaaggtattcacattatattaccaaagttttattaatatatttatatttgtggttctcttgtttctcaataataatgtctaggagtatgatggaaccacttgctgtgggaagagtgataggagatgtggttgatgtattcaacccaagtgtgagaatgaatgtgatttattccactaagcaagttgctaatggtcatgagcttatgccttcaacccttgtgcccaagcctagagttgagattggtggtcatgacttaagggatgcttataccttggtaattcaattaattaattaattaattaattattagttgctagctattcttattttaattttcatgttgatacttggtattttgtttggtagattatgacagacccagatgctccaagtcctagtgatccatacttgagggaacatcttcactggtttgtagtttgtacaaacaatcatattcattgattaattaattattattctttttagataaactaataattctctctaatgaacttaactggttccaattttccaggatggttgtagatattcctggcaccactgatgcatcttttggttagttcctctaactttctattttgttaggattgattcttgtacaagactttttctttaattagatgagactcacgtataattgtctttatgaaaatttaatatttaagcatcattagataatttagcatatttaattaatttttaattattaattttacatgaaaataactgtatgtgagttttgacgtatatttattagtgtaacaatgtatatatacatatcttattacatgttcttaactttgatgtacgtgaatgaattataaagggagagagatagtggagtatgagagtccaaggccaatgataggaatacacagatatgtgttcatattgttgaagcagcatagagggagacaaacagtgagtccccctgcttcgagagagcaattcaacacaagaatcttctcacaggaaaatggccttggcctacctgttgctgctgtttacttcaatgctcaaagagaaactgctgctaggagaaggtgattcattcattccattctgaatcaacaacaatctacctaaggtggtgcatagcaatgcacgtggaataaatcatattattatctaattgtgtcgtcttattcgttacctggtcagttattattacttcttctattctaagatattcgttactttttaaagtcgtgaatattttaagatggaagaaacattgtatggtagaataaggagatatgtgtttgatgaaatgaaacctttttctctattttttgttgttgtttggagtgcacaataattggtgggttttggaagataggagatattctagtagggatattcctgatgtactttacttgacttggtgtgctatgttacctattaggttgttgtgagaagttaaggaccaaattgatgatgttgttccttttaagaattttatgatttgtgatgggaaattaaaggacacatactataataacaaagctttatata

SEQ ID NO: 1530 - protein, 174 aa, Arachis hypogaea
MSRSMMEPLAVGRVIGDVVDVFNPSVRMNVIYSTKQVANGHELMPSTLVPKPRVEIGGHDLRDAYTLIMTDPDAPSPSDPYLREHLHWMVVDIPGTTDASFGREIVEYESPRPMIGIHRYVFILLKQHRGRQTVSPPASREQFNTRIFSQENGLGLPVAAVYFNAQRETAARRR

SEQ ID NO: 1531 - DNA, 20 bp, Arachis hypogaea
  source 1..20: mol_type = genomic DNA
ggaaaggacatgtgtttttt

SEQ ID NO: 1532 - DNA, 20 bp, Arachis hypogaea
  source 1..20: mol_type = genomic DNA
gggcttttctatttaaggaa

SEQ ID NO: 1533 - DNA, 20 bp, Arachis hypogaea
  source 1..20: mol_type = genomic DNA
tctaagggcttttctattta

SEQ ID NO: 1534 - DNA, 20 bp, Arachis hypogaea
  source 1..20: mol_type = genomic DNA
tccatggagcaaagatctaa

SEQ ID NO: 1535 - DNA, 20 bp, Arachis hypogaea
  source 1..20: mol_type = genomic DNA
ttccatggagcaaagatcta

SEQ ID NO: 1536 - DNA, 20 bp, Arachis hypogaea
  source 1..20: mol_type = genomic DNA
gcccttagatctttgctcca

SEQ ID NO: 1537 - DNA, 20 bp, Arachis hypogaea
  source 1..20: mol_type = genomic DNA
aagcacaaagaaagattcca

SEQ ID NO: 1538 - DNA, 20 bp, Arachis hypogaea
  source 1..20: mol_type = genomic DNA
atctttctttgtgctttatg

SEQ ID NO: 1539 - DNA, 20 bp, Arachis hypogaea
  source 1..20: mol_type = genomic DNA
gtggctatatatatgcattg

SEQ ID NO: 1540 - DNA, 20 bp, Arachis hypogaea
  source 1..20: mol_type = genomic DNA
atatatatgcattgaggaat

SEQ ID NO: 1541 - DNA, 20 bp, Arachis hypogaea
  source 1..20: mol_type = genomic DNA
atgcattgaggaataggatt

SEQ ID NO: 1542 - DNA, 20 bp, Arachis hypogaea
  source 1..20: mol_type = genomic DNA
ggaataggatttggtttcca

SEQ ID NO: 1543 - DNA, 20 bp, Arachis hypogaea
  source 1..20: mol_type = genomic DNA
gtaatataatgtgaatacct

SEQ ID NO: 1544 - DNA, 20 bp, Arachis hypogaea
  source 1..20: mol_type = genomic DNA
taaatatattaataaaactt

SEQ ID NO: 1545 - DNA, 20 bp, Arachis hypogaea
  source 1..20: mol_type = genomic DNA
tattaatatatttatatttg

SEQ ID NO: 1546 - DNA, 20 bp, Arachis hypogaea
  source 1..20: mol_type = genomic DNA
gtttctcaataataatgtct

SEQ ID NO: 1547 - DNA, 20 bp, Arachis hypogaea
  source 1..20: mol_type = genomic DNA
aataatgtctaggagtatga

SEQ ID NO: 1548 - DNA, 20 bp, Arachis hypogaea
  source 1..20: mol_type = genomic DNA
atcactcttcccacagcaag

SEQ ID NO: 1549 - DNA, 20 bp, Arachis hypogaea
  source 1..20: mol_type = genomic DNA
tatgatggaaccacttgctg

SEQ ID NO: 1550 - DNA, 20 bp, Arachis hypogaea
  source 1..20: mol_type = genomic DNA
atgatggaaccacttgctgt

SEQ ID NO: 1551 - DNA, 20 bp, Arachis hypogaea
  source 1..20: mol_type = genomic DNA
cttgctgtgggaagagtgat

SEQ ID NO: 1552 - DNA, 20 bp, Arachis hypogaea
  source 1..20: mol_type = genomic DNA
gggaagagtgataggagatg

SEQ ID NO: 1553 - DNA, 20 bp, Arachis hypogaea
  source 1..20: mol_type = genomic DNA
tcacattcattctcacactt

SEQ ID NO: 1554 - DNA, 20 bp, Arachis hypogaea
  source 1..20: mol_type = genomic DNA
atcacattcattctcacact

SEQ ID NO: 1555 - DNA, 20 bp, Arachis hypogaea
  source 1..20: mol_type = genomic DNA
accattagcaacttgcttag

SEQ ID NO: 1556 - DNA, 20 bp, Arachis hypogaea
  source 1..20: mol_type = genomic DNA
tccactaagcaagttgctaa

SEQ ID NO: 1557 - DNA, 20 bp, Arachis hypogaea
  source 1..20: mol_type = genomic DNA
ggcttgggcacaagggttga

SEQ ID NO: 1558 - DNA, 20 bp, Arachis hypogaea
  source 1..20: mol_type = genomic DNA
aactctaggcttgggcacaa

SEQ ID NO: 1559 - DNA, 20 bp, Arachis hypogaea
  source 1..20: mol_type = genomic DNA
caactctaggcttgggcaca

SEQ ID NO: 1560 - DNA, 20 bp, Arachis hypogaea
  source 1..20: mol_type = genomic DNA
ccaatctcaactctaggctt

SEQ ID NO: 1561 - DNA, 20 bp, Arachis hypogaea
  source 1..20: mol_type = genomic DNA
accaatctcaactctaggct

SEQ ID NO: 1562 - DNA, 20 bp, Arachis hypogaea
  source 1..20: mol_type = genomic DNA
tgaccaccaatctcaactct

SEQ ID NO: 1563 - DNA, 20 bp, Arachis hypogaea
  source 1..20: mol_type = genomic DNA
cccaagcctagagttgagat

SEQ ID NO: 1564 - DNA, 20 bp, Arachis hypogaea
  source 1..20: mol_type = genomic DNA
aagcctagagttgagattgg

SEQ ID NO: 1565 - DNA, 20 bp, Arachis hypogaea
  source 1..20: mol_type = genomic DNA
agattggtggtcatgactta

SEQ ID NO: 1566 - DNA, 20 bp, Arachis hypogaea
  source 1..20: mol_type = genomic DNA
gattggtggtcatgacttaa

SEQ ID NO: 1567 - DNA, 20 bp, Arachis hypogaea
  source 1..20: mol_type = genomic DNA
cttaagggatgcttatacct

SEQ ID NO: 1568 - DNA, 20 bp, Arachis hypogaea
  source 1..20: mol_type = genomic DNA
attaattaattgaattacca

SEQ ID NO: 1569 - DNA, 20 bp, Arachis hypogaea
  source 1..20: mol_type = genomic DNA
ttaattttcatgttgatact

SEQ ID NO: 1570 - DNA, 20 bp, Arachis hypogaea
  source 1..20: mol_type = genomic DNA
ttgatacttggtattttgtt

SEQ ID NO: 1571 - DNA, 20 bp, Arachis hypogaea
  source 1..20: mol_type = genomic DNA
cactaggacttggagcatct

SEQ ID NO: 1572 - DNA, 20 bp, Arachis hypogaea
  source 1..20: mol_type = genomic DNA
tcactaggacttggagcatc

SEQ ID NO: 1573 - DNA, 20 bp, Arachis hypogaea
  source 1..20: mol_type = genomic DNA
aagtatggatcactaggact

SEQ ID NO: 1574 - DNA, 20 bp, Arachis hypogaea
  source 1..20: mol_type = genomic DNA
tccctcaagtatggatcact

SEQ ID NO: 1575 - DNA, 20 bp, Arachis hypogaea
  source 1..20: mol_type = genomic DNA
gtcctagtgatccatacttg

SEQ ID NO: 1576 - DNA, 20 bp, Arachis hypogaea
  source 1..20: mol_type = genomic DNA
tgaagatgttccctcaagta

SEQ ID NO: 1577 - DNA, 20 bp, Arachis hypogaea
  source 1..20: mol_type = genomic DNA
tcctagtgatccatacttga

SEQ ID NO: 1578 - DNA, 20 bp, Arachis hypogaea
  source 1..20: mol_type = genomic DNA
acttgagggaacatcttcac

SEQ ID NO: 1579 - DNA, 20 bp, Arachis hypogaea
  source 1..20: mol_type = genomic DNA
ttctctctaatgaacttaac

SEQ ID NO: 1580 - DNA, 20 bp, Arachis hypogaea
  source 1..20: mol_type = genomic DNA
ctacaaccatcctggaaaat

SEQ ID NO: 1581 - DNA, 20 bp, Arachis hypogaea
  source 1..20: mol_type = genomic DNA
ttaactggttccaattttcc

SEQ ID NO: 1582 - DNA, 20 bp, Arachis hypogaea
  source 1..20: mol_type = genomic DNA
ctggttccaattttccagga

SEQ ID NO: 1583 - DNA, 20 bp, Arachis hypogaea
  source 1..20: mol_type = genomic DNA
aggaatatctacaaccatcc

SEQ ID NO: 1584 - DNA, 20 bp, Arachis hypogaea
  source 1..20: mol_type = genomic DNA
aggatggttgtagatattcc

SEQ ID NO: 1585 - DNA, 20 bp, Arachis hypogaea
  source 1..20: mol_type = genomic DNA
aaagatgcatcagtggtgcc

SEQ ID NO: 1586 - DNA, 20 bp, Arachis hypogaea
  source 1..20: mol_type = genomic DNA
ctaaccaaaagatgcatcag

SEQ ID NO: 1587 - DNA, 20 bp, Arachis hypogaea
  source 1..20: mol_type = genomic DNA
ggcaccactgatgcatcttt

SEQ ID NO: 1588 - DNA, 20 bp, Arachis hypogaea
  source 1..20: mol_type = genomic DNA
ctaacaaaatagaaagttag

SEQ ID NO: 1589 - DNA, 20 bp, Arachis hypogaea
  source 1..20: mol_type = genomic DNA
ctctaactttctattttgtt

SEQ ID NO: 1590 - DNA, 20 bp, Arachis hypogaea
  source 1..20: mol_type = genomic DNA
tgtacgtgaatgaattataa

SEQ ID NO: 1591 - DNA, 20 bp, Arachis hypogaea
  source 1..20: mol_type = genomic DNA
gtacgtgaatgaattataaa

SEQ ID NO: 1592 - DNA, 20 bp, Arachis hypogaea
  source 1..20: mol_type = genomic DNA
ttataaagggagagagatag

SEQ ID NO: 1593 - DNA, 20 bp, Arachis hypogaea
  source 1..20: mol_type = genomic DNA
tagtggagtatgagagtcca

SEQ ID NO: 1594 - DNA, 20 bp, Arachis hypogaea
  source 1..20: mol_type = genomic DNA
tgtattcctatcattggcct

SEQ ID NO: 1595 - DNA, 20 bp, Arachis hypogaea
  source 1..20: mol_type = genomic DNA
gagagtccaaggccaatgat

SEQ ID NO: 1596 - DNA, 20 bp, Arachis hypogaea
  source 1..20: mol_type = genomic DNA
tatctgtgtattcctatcat

SEQ ID NO: 1597 - DNA, 20 bp, Arachis hypogaea
  source 1..20: mol_type = genomic DNA
atattgttgaagcagcatag

SEQ ID NO: 1598 - DNA, 20 bp, Arachis hypogaea
  source 1..20: mol_type = genomic DNA
tattgttgaagcagcataga

SEQ ID NO: 1599 - DNA, 20 bp, Arachis hypogaea
  source 1..20: mol_type = genomic DNA
aattgctctctcgaagcagg

SEQ ID NO: 1600 - DNA, 20 bp, Arachis hypogaea
  source 1..20: mol_type = genomic DNA
gaattgctctctcgaagcag

SEQ ID NO: 1601 - DNA, 20 bp, Arachis hypogaea
  source 1..20: mol_type = genomic DNA
tgaattgctctctcgaagca

SEQ ID NO: 1602 - DNA, 20 bp, Arachis hypogaea
  source 1..20: mol_type = genomic DNA
ttgaattgctctctcgaagc

SEQ ID NO: 1603 - DNA, 20 bp, Arachis hypogaea
  source 1..20: mol_type = genomic DNA
caacacaagaatcttctcac

SEQ ID NO: 1604 - DNA, 20 bp, Arachis hypogaea
  source 1..20: mol_type = genomic DNA
agaatcttctcacaggaaaa

SEQ ID NO: 1605 - DNA, 20 bp, Arachis hypogaea
  source 1..20: mol_type = genomic DNA
ttctcacaggaaaatggcct

SEQ ID NO: 1606 - DNA, 20 bp, Arachis hypogaea
  source 1..20: mol_type = genomic DNA
cagcagcaacaggtaggcca

SEQ ID NO: 1607 - DNA, 20 bp, Arachis hypogaea
  source 1..20: mol_type = genomic DNA
agtaaacagcagcaacaggt

SEQ ID NO: 1608 - DNA, 20 bp, Arachis hypogaea
  source 1..20: mol_type = genomic DNA
ttgaagtaaacagcagcaac

SEQ ID NO: 1609 - DNA, 20 bp, Arachis hypogaea
  source 1..20: mol_type = genomic DNA
ctcaaagagaaactgctgct

SEQ ID NO: 1610 - DNA, 20 bp, Arachis hypogaea
  source 1..20: mol_type = genomic DNA
gagaaactgctgctaggaga

SEQ ID NO: 1611 - DNA, 20 bp, Arachis hypogaea
  source 1..20: mol_type = genomic DNA
agattgttgttgattcagaa

SEQ ID NO: 1612 - DNA, 20 bp, Arachis hypogaea
  source 1..20: mol_type = genomic DNA
aatcaacaacaatctaccta

SEQ ID NO: 1613 - DNA, 20 bp, Arachis hypogaea
  source 1..20: mol_type = genomic DNA
caacaacaatctacctaagg

SEQ ID NO: 1614 - DNA, 20 bp, Arachis hypogaea
  source 1..20: mol_type = genomic DNA
gcattgctatgcaccacctt

SEQ ID NO: 1615 - DNA, 20 bp, Arachis hypogaea
  source 1..20: mol_type = genomic DNA
gtggtgcatagcaatgcacg

SEQ ID NO: 1616 - DNA, 20 bp, Arachis hypogaea
  source 1..20: mol_type = genomic DNA
gtgtcgtcttattcgttacc

SEQ ID NO: 1617 - DNA, 20 bp, Arachis hypogaea
  source 1..20: mol_type = genomic DNA
agaagtaataataactgacc

SEQ ID NO: 1618 - DNA, 20 bp, Arachis hypogaea
  source 1..20: mol_type = genomic DNA
aagtcgtgaatattttaaga

SEQ ID NO: 1619 - DNA, 20 bp, Arachis hypogaea
  source 1..20: mol_type = genomic DNA
aagatggaagaaacattgta

SEQ ID NO: 1620 - DNA, 20 bp, Arachis hypogaea
  source 1..20: mol_type = genomic DNA
aaacattgtatggtagaata

SEQ ID NO: 1621 - DNA, 20 bp, Arachis hypogaea
  source 1..20: mol_type = genomic DNA
acaacaaaaaatagagaaaa

SEQ ID NO: 1622 - DNA, 20 bp, Arachis hypogaea
  source 1..20: mol_type = genomic DNA
ctctattttttgttgttgtt

SEQ ID NO: 1623 - DNA, 20 bp, Arachis hypogaea
  source 1..20: mol_type = genomic DNA
tgtttggagtgcacaataat

SEQ ID NO: 1624 - DNA, 20 bp, Arachis hypogaea
  source 1..20: mol_type = genomic DNA
ttggagtgcacaataattgg

SEQ ID NO: 1625 - DNA, 20 bp, Arachis hypogaea
  source 1..20: mol_type = genomic DNA
tggagtgcacaataattggt

SEQ ID NO: 1626 - DNA, 20 bp, Arachis hypogaea
  source 1..20: mol_type = genomic DNA
gcacaataattggtgggttt

SEQ ID NO: 1627 - DNA, 20 bp, Arachis hypogaea
  source 1..20: mol_type = genomic DNA
attggtgggttttggaagat

SEQ ID NO: 1628 - DNA, 20 bp, Arachis hypogaea
  source 1..20: mol_type = genomic DNA
aagataggagatattctagt

SEQ ID NO: 1629 - DNA, 20 bp, Arachis hypogaea
  source 1..20: mol_type = genomic DNA
agataggagatattctagta

SEQ ID NO: 1630 - DNA, 20 bp, Arachis hypogaea
  source 1..20: mol_type = genomic DNA
caagtcaagtaaagtacatc

SEQ ID NO: 1631 - DNA, 20 bp, Arachis hypogaea
  source 1..20: mol_type = genomic DNA
ctgatgtactttacttgact

SEQ ID NO: 1632 - DNA, 20 bp, Arachis hypogaea
  source 1..20: mol_type = genomic DNA
ggtgtgctatgttacctatt

SEQ ID NO: 1633 - DNA, 20 bp, Arachis hypogaea
  source 1..20: mol_type = genomic DNA
acttctcacaacaacctaat

SEQ ID NO: 1634 - DNA, 20 bp, Arachis hypogaea
  source 1..20: mol_type = genomic DNA
taggttgttgtgagaagtta

SEQ ID NO: 1635 - DNA, 20 bp, Arachis hypogaea
  source 1..20: mol_type = genomic DNA
aaggaacaacatcatcaatt

SEQ ID NO: 1636 - DNA, 20 bp, Arachis hypogaea
  source 1..20: mol_type = genomic DNA
caaatcataaaattcttaaa

SEQ ID NO: 1637 - DNA, 20 bp, Arachis hypogaea
  source 1..20: mol_type = genomic DNA
aagaattttatgatttgtga

SEQ ID NO: 1638 - DNA, 20 bp, Arachis hypogaea
  source 1..20: mol_type = genomic DNA
agaattttatgatttgtgat

SEQ ID NO: 1639 - DNA, 20 bp, Arachis hypogaea
  source 1..20: mol_type = genomic DNA
gatttgtgatgggaaattaa

SEQ ID NO: 1640 - DNA, 1638 bp, Arachis hypogaea
  source 1..1638: mol_type = genomic DNA
acatacctaaaaaacacatgtcctttccttaaatagaaaagcccttagatctttgttccatggaatctttctttgtgctttatctggctatatatatgcattgaggatttggtttccaaggtattcacattatatttatatttgtggttctcttgtttctcaataataatgtctaggaatatgatggaaccacttgctgtgggaagagtgataggagatgtggttgatgtattcaacccaagtgtgagaatgaatgtgatttattccactaagcaagttgctaatggtcatgagcttatgccttcaacccttgtgcccaagcctagagttgagattggtggtcatgacttaagggatgcttataccttggtaattcaattaattaattattacttagcttgctattcttattctaattttcatgttgatacttggtattttgtttggtagattatgacagacccagatgctccaagtcctagtgatccatacttgagggaacatcttcactggtttgtagtttgtacaaacaatcatattcattgatatgttatttattatttcttttagataaactgataattctctctaatgaacttaactggttccaattttccaggatggttgtagatattcctggcaccactgatgcatcttttggttagttcctctaataactttctattttgtcacgattgattcttgtgcaagactttttctttaattagatatgagagtcgcgtataattgtttttatgaaaattcaatatttaagcatctttagataatttagcatatttgattaatttttaattattaattttacatgaaaataattgcatgtgaatttttacgtatatttattaatgtaacaatgtatatacacatatcttattacatgttgttaactttgatgtatgtgaatgaattataaagggagagagatagtggagtatgagagtccaaggccagtgataggaatacacagatatgtgttcatattgttgaagcagcatagagggagacaaacagtgagtcccccggcttcgagagaacaattcaacacaagaatcttctctcaggaaaatggccttggcctacctgttgctgctgtttacttcaatgctcaaagagaaactgctgctaggagaaggtgattcattccttccattccgactcaacaacaatctacttaaggtggtgcatatatagcaatgcacgttgaataaatcatgttattatctaattgtgtcgtcgttacctggtcagttattattacttcttatattctaagatattcgttactttttaaagttgcaaatattttaaaatggaagaaacattgtatggtagaataaggggataggtgtttgatgaattgaaacatttttctttcttttttttgttgtttggagtgcacaataattggtgggttttggaagataggagatattctagtagggatattcttgatgtactttagtttacttgacttggtgtgctatgttacctattaggttgttgtgagaagttaaggaccaaattgaagatgttgttccttttaagaattttatgatttgtgatagaaagttaaaggacacgcactataataacaaagctttatatatatggcttgtc

SEQ ID NO: 1641 - protein, 174 aa, Arachis hypogaea
MSRNMMEPLAVGRVIGDVVDVFNPSVRMNVIYSTKQVANGHELMPSTLVPKPRVEIGGHDLRDAYTLIMTDPDAPSPSDPYLREHLHWMVVDIPGTTDASFGREIVEYESPRPVIGIHRYVFILLKQHRGRQTVSPPASREQFNTRIFSQENGLGLPVAAVYFNAQRETAARRR

SEQ ID NO: 1642 - DNA, 20 bp, Arachis hypogaea
  source 1..20: mol_type = genomic DNA
ggaaaggacatgtgtttttt

SEQ ID NO: 1643 - DNA, 20 bp, Arachis hypogaea
  source 1..20: mol_type = genomic DNA
gggcttttctatttaaggaa

SEQ ID NO: 1644 - DNA, 20 bp, Arachis hypogaea
  source 1..20: mol_type = genomic DNA
tctaagggcttttctattta

SEQ ID NO: 1645 - DNA, 20 bp, Arachis hypogaea
  source 1..20: mol_type = genomic DNA
tccatggaacaaagatctaa

SEQ ID NO: 1646 - DNA, 20 bp, Arachis hypogaea
  source 1..20: mol_type = genomic DNA
ttccatggaacaaagatcta

SEQ ID NO: 1647 - DNA, 20 bp, Arachis hypogaea
  source 1..20: mol_type = genomic DNA
gcccttagatctttgttcca

SEQ ID NO: 1648 - DNA, 20 bp, Arachis hypogaea
  source 1..20: mol_type = genomic DNA
aagcacaaagaaagattcca

SEQ ID NO: 1649 - DNA, 20 bp, Arachis hypogaea
  source 1..20: mol_type = genomic DNA
atctttctttgtgctttatc

SEQ ID NO: 1650 - DNA, 20 bp, Arachis hypogaea
  source 1..20: mol_type = genomic DNA
ctggctatatatatgcattg

SEQ ID NO: 1651 - DNA, 20 bp, Arachis hypogaea
  source 1..20: mol_type = genomic DNA
atatatatgcattgaggatt

SEQ ID NO: 1652 - DNA, 20 bp, Arachis hypogaea
  source 1..20: mol_type = genomic DNA
cattgaggatttggtttcca

SEQ ID NO: 1653 - DNA, 20 bp, Arachis hypogaea
  source 1..20: mol_type = genomic DNA
taaatataatgtgaatacct

SEQ ID NO: 1654 - DNA, 20 bp, Arachis hypogaea
  source 1..20: mol_type = genomic DNA
tcacattatatttatatttg

SEQ ID NO: 1655 - DNA, 20 bp, Arachis hypogaea
  source 1..20: mol_type = genomic DNA
gtttctcaataataatgtct

SEQ ID NO: 1656 - DNA, 20 bp, Arachis hypogaea
  source 1..20: mol_type = genomic DNA
aataatgtctaggaatatga

SEQ ID NO: 1657 - DNA, 20 bp, Arachis hypogaea
  source 1..20: mol_type = genomic DNA
atcactcttcccacagcaag

SEQ ID NO: 1658 - DNA, 20 bp, Arachis hypogaea
  source 1..20: mol_type = genomic DNA
tatgatggaaccacttgctg

SEQ ID NO: 1659 - DNA, 20 bp, Arachis hypogaea
  source 1..20: mol_type = genomic DNA
atgatggaaccacttgctgt

SEQ ID NO: 1660 - DNA, 20 bp, Arachis hypogaea
  source 1..20: mol_type = genomic DNA
cttgctgtgggaagagtgat

SEQ ID NO: 1661 - DNA, 20 bp, Arachis hypogaea
  source 1..20: mol_type = genomic DNA
gggaagagtgataggagatg

SEQ ID NO: 1662 - DNA, 20 bp, Arachis hypogaea
  source 1..20: mol_type = genomic DNA
tcacattcattctcacactt

SEQ ID NO: 1663 - DNA, 20 bp, Arachis hypogaea
  source 1..20: mol_type = genomic DNA
atcacattcattctcacact

SEQ ID NO: 1664 - DNA, 20 bp, Arachis hypogaea
  source 1..20: mol_type = genomic DNA
accattagcaacttgcttag

SEQ ID NO: 1665 - DNA, 20 bp, Arachis hypogaea
  source 1..20: mol_type = genomic DNA
tccactaagcaagttgctaa

SEQ ID NO: 1666 - DNA, 20 bp, Arachis hypogaea
  source 1..20: mol_type = genomic DNA
ggcttgggcacaagggttga

SEQ ID NO: 1667 - DNA, 20 bp, Arachis hypogaea
  source 1..20: mol_type = genomic DNA
aactctaggcttgggcacaa

SEQ ID NO: 1668 - DNA, 20 bp, Arachis hypogaea
  source 1..20: mol_type = genomic DNA
caactctaggcttgggcaca

SEQ ID NO: 1669 - DNA, 20 bp, Arachis hypogaea
  source 1..20: mol_type = genomic DNA
ccaatctcaactctaggctt

SEQ ID NO: 1670 - DNA, 20 bp, Arachis hypogaea
  source 1..20: mol_type = genomic DNA
accaatctcaactctaggct

SEQ ID NO: 1671 - DNA, 20 bp, Arachis hypogaea
  source 1..20: mol_type = genomic DNA
tgaccaccaatctcaactct

SEQ ID NO: 1672 - DNA, 20 bp, Arachis hypogaea
  source 1..20: mol_type = genomic DNA
cccaagcctagagttgagat

SEQ ID NO: 1673 - DNA, 20 bp, Arachis hypogaea
  source 1..20: mol_type = genomic DNA
aagcctagagttgagattgg

SEQ ID NO: 1674 - DNA, 20 bp, Arachis hypogaea
  source 1..20: mol_type = genomic DNA
agattggtggtcatgactta

SEQ ID NO: 1675 - DNA, 20 bp, Arachis hypogaea
  source 1..20: mol_type = genomic DNA
gattggtggtcatgacttaa

SEQ ID NO: 1676 - DNA, 20 bp, Arachis hypogaea
  source 1..20: mol_type = genomic DNA
cttaagggatgcttatacct

SEQ ID NO: 1677 - DNA, 20 bp, Arachis hypogaea
  source 1..20: mol_type = genomic DNA
attaattaattgaattacca

SEQ ID NO: 1678 - DNA, 20 bp, Arachis hypogaea
  source 1..20: mol_type = genomic DNA
ctaattttcatgttgatact

SEQ ID NO: 1679 - DNA, 20 bp, Arachis hypogaea
  source 1..20: mol_type = genomic DNA
ttgatacttggtattttgtt

SEQ ID NO: 1680 - DNA, 20 bp, Arachis hypogaea
  source 1..20: mol_type = genomic DNA
cactaggacttggagcatct

SEQ ID NO: 1681 - DNA, 20 bp, Arachis hypogaea
  source 1..20: mol_type = genomic DNA
tcactaggacttggagcatc

SEQ ID NO: 1682 - DNA, 20 bp, Arachis hypogaea
  source 1..20: mol_type = genomic DNA
aagtatggatcactaggact

SEQ ID NO: 1683 - DNA, 20 bp, Arachis hypogaea
  source 1..20: mol_type = genomic DNA
tccctcaagtatggatcact

SEQ ID NO: 1684 - DNA, 20 bp, Arachis hypogaea
  source 1..20: mol_type = genomic DNA
gtcctagtgatccatacttg

SEQ ID NO: 1685 - DNA, 20 bp, Arachis hypogaea
  source 1..20: mol_type = genomic DNA
tgaagatgttccctcaagta

SEQ ID NO: 1686 - DNA, 20 bp, Arachis hypogaea
  source 1..20: mol_type = genomic DNA
tcctagtgatccatacttga

SEQ ID NO: 1687 - DNA, 20 bp, Arachis hypogaea
  source 1..20: mol_type = genomic DNA
acttgagggaacatcttcac

SEQ ID NO: 1688 - DNA, 20 bp, Arachis hypogaea
  source 1..20: mol_type = genomic DNA
ttctctctaatgaacttaac

SEQ ID NO: 1689 - DNA, 20 bp, Arachis hypogaea
  source 1..20: mol_type = genomic DNA
ctacaaccatcctggaaaat

SEQ ID NO: 1690 - DNA, 20 bp, Arachis hypogaea
  source 1..20: mol_type = genomic DNA
ttaactggttccaattttcc

SEQ ID NO: 1691 - DNA, 20 bp, Arachis hypogaea
  source 1..20: mol_type = genomic DNA
ctggttccaattttccagga

SEQ ID NO: 1692 - DNA, 20 bp, Arachis hypogaea
  source 1..20: mol_type = genomic DNA
aggaatatctacaaccatcc

SEQ ID NO: 1693 - DNA, 20 bp, Arachis hypogaea
  source 1..20: mol_type = genomic DNA
aggatggttgtagatattcc

SEQ ID NO: 1694 - DNA, 20 bp, Arachis hypogaea
  source 1..20: mol_type = genomic DNA
aaagatgcatcagtggtgcc

SEQ ID NO: 1695 - DNA, 20 bp, Arachis hypogaea
  source 1..20: mol_type = genomic DNA
ctaaccaaaagatgcatcag

SEQ ID NO: 1696 - DNA, 20 bp, Arachis hypogaea
  source 1..20: mol_type = genomic DNA
ggcaccactgatgcatcttt

SEQ ID NO: 1697 - DNA, 20 bp, Arachis hypogaea
  source 1..20: mol_type = genomic DNA
acaaaatagaaagttattag

SEQ ID NO: 1698 - DNA, 20 bp, Arachis hypogaea
  source 1..20: mol_type = genomic DNA
tgtatgtgaatgaattataa

SEQ ID NO: 1699 - DNA, 20 bp, Arachis hypogaea
  source 1..20: mol_type = genomic DNA
gtatgtgaatgaattataaa

SEQ ID NO: 1700 - DNA, 20 bp, Arachis hypogaea
  source 1..20: mol_type = genomic DNA
ttataaagggagagagatag

SEQ ID NO: 1701 - DNA, 20 bp, Arachis hypogaea
  source 1..20: mol_type = genomic DNA
tagtggagtatgagagtcca

SEQ ID NO: 1702 - DNA, 20 bp, Arachis hypogaea
  source 1..20: mol_type = genomic DNA
tgtattcctatcactggcct

SEQ ID NO: 1703 - DNA, 20 bp, Arachis hypogaea
  source 1..20: mol_type = genomic DNA
gagagtccaaggccagtgat

SEQ ID NO: 1704 - DNA, 20 bp, Arachis hypogaea
  source 1..20: mol_type = genomic DNA
tatctgtgtattcctatcac

SEQ ID NO: 1705 - DNA, 20 bp, Arachis hypogaea
  source 1..20: mol_type = genomic DNA
atattgttgaagcagcatag

SEQ ID NO: 1706 - DNA, 20 bp, Arachis hypogaea
  source 1..20: mol_type = genomic DNA
tattgttgaagcagcataga

SEQ ID NO: 1707 - DNA, 20 bp, Arachis hypogaea
  source 1..20: mol_type = genomic DNA
gagacaaacagtgagtcccc

SEQ ID NO: 1708 - DNA, 20 bp, Arachis hypogaea
  source 1..20: mol_type = genomic DNA
aattgttctctcgaagccgg

SEQ ID NO: 1709 - DNA, 20 bp, Arachis hypogaea
  source 1..20: mol_type = genomic DNA
gaattgttctctcgaagccg

SEQ ID NO: 1710 - DNA, 20 bp, Arachis hypogaea
  source 1..20: mol_type = genomic DNA
tgaattgttctctcgaagcc

SEQ ID NO: 1711 - DNA, 20 bp, Arachis hypogaea
  source 1..20: mol_type = genomic DNA
ttgaattgttctctcgaagc

SEQ ID NO: 1712 - DNA, 20 bp, Arachis hypogaea
  source 1..20: mol_type = genomic DNA
caacacaagaatcttctctc

SEQ ID NO: 1713 - DNA, 20 bp, Arachis hypogaea
  source 1..20: mol_type = genomic DNA
agaatcttctctcaggaaaa

SEQ ID NO: 1714 - DNA, 20 bp, Arachis hypogaea
  source 1..20: mol_type = genomic DNA
ttctctcaggaaaatggcct

SEQ ID NO: 1715 - DNA, 20 bp, Arachis hypogaea
  source 1..20: mol_type = genomic DNA
cagcagcaacaggtaggcca

SEQ ID NO: 1716 - DNA, 20 bp, Arachis hypogaea
  source 1..20: mol_type = genomic DNA
agtaaacagcagcaacaggt

SEQ ID NO: 1717 - DNA, 20 bp, Arachis hypogaea
  source 1..20: mol_type = genomic DNA
ttgaagtaaacagcagcaac

SEQ ID NO: 1718 - DNA, 20 bp, Arachis hypogaea
  source 1..20: mol_type = genomic DNA
ctcaaagagaaactgctgct

SEQ ID NO: 1719 - DNA, 20 bp, Arachis hypogaea
  source 1..20: mol_type = genomic DNA
gagaaactgctgctaggaga

SEQ ID NO: 1720 - DNA, 20 bp, Arachis hypogaea
  source 1..20: mol_type = genomic DNA
tgttgttgagtcggaatgga

SEQ ID NO: 1721 - DNA, 20 bp, Arachis hypogaea
  source 1..20: mol_type = genomic DNA
agattgttgttgagtcggaa

SEQ ID NO: 1722 - DNA, 20 bp, Arachis hypogaea
  source 1..20: mol_type = genomic DNA
taagtagattgttgttgagt

SEQ ID NO: 1723 - DNA, 20 bp, Arachis hypogaea
  source 1..20: mol_type = genomic DNA
actcaacaacaatctactta

SEQ ID NO: 1724 - DNA, 20 bp, Arachis hypogaea
  source 1..20: mol_type = genomic DNA
caacaacaatctacttaagg

SEQ ID NO: 1725 - DNA, 20 bp, Arachis hypogaea
  source 1..20: mol_type = genomic DNA
ctaattgtgtcgtcgttacc

SEQ ID NO: 1726 - DNA, 20 bp, Arachis hypogaea
  source 1..20: mol_type = genomic DNA
agaagtaataataactgacc

SEQ ID NO: 1727 - DNA, 20 bp, Arachis hypogaea
  source 1..20: mol_type = genomic DNA
aagttgcaaatattttaaaa

SEQ ID NO: 1728 - DNA, 20 bp, Arachis hypogaea
  source 1..20: mol_type = genomic DNA
aaaatggaagaaacattgta

SEQ ID NO: 1729 - DNA, 20 bp, Arachis hypogaea
  source 1..20: mol_type = genomic DNA
aaacattgtatggtagaata

SEQ ID NO: 1730 - DNA, 20 bp, Arachis hypogaea
  source 1..20: mol_type = genomic DNA
aacattgtatggtagaataa

SEQ ID NO: 1731 - DNA, 20 bp, Arachis hypogaea
  source 1..20: mol_type = genomic DNA
acattgtatggtagaataag

SEQ ID NO: 1732 - DNA, 20 bp, Arachis hypogaea
  source 1..20: mol_type = genomic DNA
gtatggtagaataaggggat

SEQ ID NO: 1733 - DNA, 20 bp, Arachis hypogaea
  source 1..20: mol_type = genomic DNA
tctttcttttttttgttgtt

SEQ ID NO: 1734 - DNA, 20 bp, Arachis hypogaea
  source 1..20: mol_type = genomic DNA
tgtttggagtgcacaataat

SEQ ID NO: 1735 - DNA, 20 bp, Arachis hypogaea
  source 1..20: mol_type = genomic DNA
ttggagtgcacaataattgg

SEQ ID NO: 1736 - DNA, 20 bp, Arachis hypogaea
  source 1..20: mol_type = genomic DNA
tggagtgcacaataattggt

SEQ ID NO: 1737 - DNA, 20 bp, Arachis hypogaea
  source 1..20: mol_type = genomic DNA
gcacaataattggtgggttt

SEQ ID NO: 1738 - DNA, 20 bp, Arachis hypogaea
  source 1..20: mol_type = genomic DNA
attggtgggttttggaagat

SEQ ID NO: 1739 - DNA, 20 bp, Arachis hypogaea
  source 1..20: mol_type = genomic DNA
aagataggagatattctagt

SEQ ID NO: 1740 - DNA, 20 bp, Arachis hypogaea
  source 1..20: mol_type = genomic DNA
agataggagatattctagta

SEQ ID NO: 1741 - DNA, 20 bp, Arachis hypogaea
  source 1..20: mol_type = genomic DNA
gtactttagtttacttgact

SEQ ID NO: 1742 - DNA, 20 bp, Arachis hypogaea
  source 1..20: mol_type = genomic DNA
ggtgtgctatgttacctatt

SEQ ID NO: 1743 - DNA, 20 bp, Arachis hypogaea
  source 1..20: mol_type = genomic DNA
acttctcacaacaacctaat

SEQ ID NO: 1744 - DNA, 20 bp, Arachis hypogaea
  source 1..20: mol_type = genomic DNA
taggttgttgtgagaagtta

SEQ ID NO: 1745 - DNA, 20 bp, Arachis hypogaea
  source 1..20: mol_type = genomic DNA
aaggaacaacatcttcaatt

SEQ ID NO: 1746 - DNA, 20 bp, Arachis hypogaea
  source 1..20: mol_type = genomic DNA
caaatcataaaattcttaaa

SEQ ID NO: 1747 - DNA, 20 bp, Arachis hypogaea
  source 1..20: mol_type = genomic DNA
gatttgtgatagaaagttaa

SEQ ID NO: 1748 - DNA, 20 bp, Arachis hypogaea
  source 1..20: mol_type = genomic DNA
ataacaaagctttatatata

SEQ ID NO: 1749 - DNA, 3658 bp, Arachis hypogaea
  source 1..3658: mol_type = genomic DNA
cataaataggggataagccctctcacgttttagtaaaatttgacaacagacagttaaacaaactgacgtaaacatatatagctgtatgcctagaacaacaataatggaccctcttgctgttggaggggtaatcggagatgttgttgatccttttgtaagttgtgtttctctgaggattgtatatcacaataactcagaagttgttaatagtttggagttgaagccatcccaaattatcaatcaaccaagagttgacgttggtggtgatgattttagaactttttacactctggtacgtagaatttactactttgtagttttctgttattaccgtatattttaaaatttcatacaatgaataactatatctgtatattatgatgcagataatggtggaccctgatgcacctagtcctactaatccaaatatgagagagtatttacactggtgagtccatagttctgtatctccatctgtgtctgctatagttacatgactgaattctgtgagtactgtttccttataaatggttaaaatttgagggtcttttatttaaataaaaaaattattattttattgcgatgcaaaaatatattattttatgcatttagttgtgttttacagttaaaaaatacggaaatagaagaatacatttttgtattaagagtatgcaaaaatcagaaaaaaattttttgtattaatataattttttattttcgtattctttacctgtgaaaacacagcttaatgtacaaaatgatatattctgtgtctgcgtttaaatcggtaaataatgaattttttatttaaataaaaaacttaaaatttgttagcctaaaaactgtagtataacgttgaccgtgcttttcttgtatgtaacagtgtaactcacatcttacttgaatttttgaaagtgtctaattataataaaaaaattacatgacccaaaataaatagtcacattcaatatatgtatgatatagttgaagttaatatttaagtgaaaacctattaaatttaagggatcgtttgatttgtatttgtatattttatttttaaaattttataaagaaaatagagataaaaaatataaattttattgttttcaccaaaatataataataaaatttgttagctttaaataagaagtctctattatttaaaaaattttaaaatattattaattgatattccatttaagtaatattattaaaaaatgtttgaattttaaaataaaaaagaataatctcagtttgagagtataaattttagaaaattcaaaattcttttagcaagtaacatgaaaattcaaaatttatattaaaattaaaaatgaactaatctcatcactttatactataccctaaaataatttacaattttttaactattctagacttcattaacatgtgaaaaaagtttcctggtaatggaaacagaagtgatatatgtaagctaatgataaaatattaaggtacagtttaggcaaatagtttaattaaattttttttttgaaaaaatagtttaaataataaatacttatattaaaaataatttataaataaattattttgtatttaattttttagttttaaaagtgcttatttaaaaaaattgtgataacaaattttttattatgagagaagttattttttttaaattttcttataagtacttaaatagttttttttagaaagttataatttagttttgaaaattgtatcagacattaatagtctaagtgttgttcgcagtgcggtttggatcggttttgagaccaaaactcatatgatccaaacactaattttacttgcggtgcgatttagattggatgattttttctttttaaataatcgatctaatttcaagcggttttgattagattggatttgcgattttgtaaattaaacaaattaaatacatataacaaatctcaacatcaatttttaaataatcaacaatgacataacaagtctcaatattatcttaaaaaaccaacgataacataacaatacaaataaaattataggttagttaaaataaataaataaataacatattaaacataaaatatttattaaataagaataatacatatataatataaaaatgtataacaaattgatcatgctataaatataattttaaatataataataaactaataattatagcacattaaacggtttggattggattgaatcagttatgaaaagtagatccaaaatccgatccgatccagcagtttacaaaaatagaattcaatcaaatctaaattagtgcggttttaatcgatttttggtttgaattgaattgaatgaacaatttaaggggcggagctagaataaacattagaggggggctaaaaatatttacacaataaaataatattaaaataattttttgaggaggctaaattgaaatttacatataatttacatgtaaacatttaaaattaggggccgttgccccctttcgcagtatgtagctccacctctggtttaaatttgaacagttctaactaatactattactttttataagttaaaaattcaaaaaataacttttaaaacttttcaaacggcctaagattatctaagaatataatacacacattactcattgtagcatgacatatttttttgaagccatgacaatgcaatcaacatgtatcccatagtaatacgttctctaactatgtatcatatcctaattaataactcaaaaatatctctatatatcactgatgagttttgcttcgatcttaaaccatggtttaggttggtaatgaatattccagggacgacaggaacgagcttcggtaagcagtcaatcaattaacatatcattgttatgtagaataatgtgattattaaataaacgaaaatttaactaagtgaaaggtaacaaatgcaggacaagagatagttggatacgaaagcccaagaccaatagcaggaatacataggatggtgtttgtgttgtacaaacaaatgaggaggcaagaagtgatacaccctccaagatggcgtaacaacttcaacactcgtgacttcgcacaagtctacaatcttggaactcctgttgctgctctctacttcaattgccagcgggagagcggttggggtggaaggagaatcatcatttagctttatccttccttcaacccaaaaatgggcttaggcccacccttaatttaccaaaatgggcttttttaattcataagtgttaaaacactactcatttaaaacctaaacccatcaccaaaatttgacctctatccttcaacaaaaataaaaaaactactattattttctctaccgttgttatgacccaaaactatataataataatactcaaaagggtctgaaagttgtactagttattgaattaaacaaggcactgatgaagcccttgatcaatggcagcagcacctgcctcactaggagctgtacctaggttcaaattctcgatgagaaatataaaacccatattagtagtaatagtgtatgtgaacgaatgtgtgttgtgtaatgtataagaaccaaaaaataaaaaacaaggcagtgatgatttgtgtcaaatataagtttgagctgtatcttatatttttttaaggttaatattagaatttactttctaaataacgaattgaag

SEQ ID NO: 1750 - protein, 180 aa, Arachis hypogaea
MPRTTIMDPLAVGGVIGDVVDPFVSCVSLRIVYHNNSEVVNSLELKPSQIINQPRVDVGGDDFRTFYTLIMVDPDAPSPTNPNMREYLHWLVMNIPGTTGTSFGQEIVGYESPRPIAGIHRMVFVLYKQMRRQEVIHPPRWRNNFNTRDFAQVYNLGTPVAALYFNCQRESGWGGRRIII

SEQ ID NO: 1751 - DNA, 20 bp, Arachis hypogaea
  source 1..20: mol_type = genomic DNA
aattttactaaaacgtgaga

SEQ ID NO: 1752 - DNA, 20 bp, Arachis hypogaea
  source 1..20: mol_type = genomic DNA
aaattttactaaaacgtgag

SEQ ID NO: 1753 - DNA, 20 bp, Arachis hypogaea
  source 1..20: mol_type = genomic DNA
gggtccattattgttgttct

SEQ ID NO: 1754 - DNA, 20 bp, Arachis hypogaea
  source 1..20: mol_type = genomic DNA
tatgcctagaacaacaataa

SEQ ID NO: 1755 - DNA, 20 bp, Arachis hypogaea
  source 1..20: mol_type = genomic DNA
ttacccctccaacagcaaga

SEQ ID NO: 1756 - DNA, 20 bp, Arachis hypogaea
  source 1..20: mol_type = genomic DNA
attacccctccaacagcaag

SEQ ID NO: 1757 - DNA, 20 bp, Arachis hypogaea
  source 1..20: mol_type = genomic DNA
ataatggaccctcttgctgt

SEQ ID NO: 1758 - DNA, 20 bp, Arachis hypogaea
  source 1..20: mol_type = genomic DNA
atggaccctcttgctgttgg

SEQ ID NO: 1759 - DNA, 20 bp, Arachis hypogaea
  source 1..20: mol_type = genomic DNA
tggaccctcttgctgttgga

SEQ ID NO: 1760 - DNA, 20 bp, Arachis hypogaea
  source 1..20: mol_type = genomic DNA
ggaccctcttgctgttggag

SEQ ID NO: 1761 - DNA, 20 bp, Arachis hypogaea
  source 1..20: mol_type = genomic DNA
cttgctgttggaggggtaat

SEQ ID NO: 1762 - DNA, 20 bp, Arachis hypogaea
  source 1..20: mol_type = genomic DNA
agagaaacacaacttacaaa

SEQ ID NO: 1763 - DNA, 20 bp, Arachis hypogaea
  source 1..20: mol_type = genomic DNA
ttgtaagttgtgtttctctg

SEQ ID NO: 1764 - DNA, 20 bp, Arachis hypogaea
  source 1..20: mol_type = genomic DNA
ctcagaagttgttaatagtt

SEQ ID NO: 1765 - DNA, 20 bp, Arachis hypogaea
  source 1..20: mol_type = genomic DNA
ggttgattgataatttggga

SEQ ID NO: 1766 - DNA, 20 bp, Arachis hypogaea
  source 1..20: mol_type = genomic DNA
tcttggttgattgataattt

SEQ ID NO: 1767 - DNA, 20 bp, Arachis hypogaea
  source 1..20: mol_type = genomic DNA
ctcttggttgattgataatt

SEQ ID NO: 1768 - DNA, 20 bp, Arachis hypogaea
  source 1..20: mol_type = genomic DNA
tcaccaccaacgtcaactct

SEQ ID NO: 1769 - DNA, 20 bp, Arachis hypogaea
  source 1..20: mol_type = genomic DNA
aatcaaccaagagttgacgt

SEQ ID NO: 1770 - DNA, 20 bp, Arachis hypogaea
  source 1..20: mol_type = genomic DNA
caaccaagagttgacgttgg

SEQ ID NO: 1771 - DNA, 20 bp, Arachis hypogaea
  source 1..20: mol_type = genomic DNA
ttttagaactttttacactc

SEQ ID NO: 1772 - DNA, 20 bp, Arachis hypogaea
  source 1..20: mol_type = genomic DNA
gtatgaaattttaaaatata

SEQ ID NO: 1773 - DNA, 20 bp, Arachis hypogaea
  source 1..20: mol_type = genomic DNA
gtatattatgatgcagataa

SEQ ID NO: 1774 - DNA, 20 bp, Arachis hypogaea
  source 1..20: mol_type = genomic DNA
tattatgatgcagataatgg

SEQ ID NO: 1775 - DNA, 20 bp, Arachis hypogaea
  source 1..20: mol_type = genomic DNA
tagtaggactaggtgcatca

SEQ ID NO: 1776 - DNA, 20 bp, Arachis hypogaea
  source 1..20: mol_type = genomic DNA
ttagtaggactaggtgcatc

SEQ ID NO: 1777 - DNA, 20 bp, Arachis hypogaea
  source 1..20: mol_type = genomic DNA
atatttggattagtaggact

SEQ ID NO: 1778 - DNA, 20 bp, Arachis hypogaea
  source 1..20: mol_type = genomic DNA
tctctcatatttggattagt

SEQ ID NO: 1779 - DNA, 20 bp, Arachis hypogaea
  source 1..20: mol_type = genomic DNA
tgtaaatactctctcatatt

SEQ ID NO: 1780 - DNA, 20 bp, Arachis hypogaea
  source 1..20: mol_type = genomic DNA
atatgagagagtatttacac

SEQ ID NO: 1781 - DNA, 20 bp, Arachis hypogaea
  source 1..20: mol_type = genomic DNA
cagatggagatacagaacta

SEQ ID NO: 1782 - DNA, 20 bp, Arachis hypogaea
  source 1..20: mol_type = genomic DNA
gtaactatagcagacacaga

SEQ ID NO: 1783 - DNA, 20 bp, Arachis hypogaea
  source 1..20: mol_type = genomic DNA
gagtactgtttccttataaa

SEQ ID NO: 1784 - DNA, 20 bp, Arachis hypogaea
  source 1..20: mol_type = genomic DNA
tcaaattttaaccatttata

SEQ ID NO: 1785 - DNA, 20 bp, Arachis hypogaea
  source 1..20: mol_type = genomic DNA
ttataaatggttaaaatttg

SEQ ID NO: 1786 - DNA, 20 bp, Arachis hypogaea
  source 1..20: mol_type = genomic DNA
tataaatggttaaaatttga

SEQ ID NO: 1787 - DNA, 20 bp, Arachis hypogaea
  source 1..20: mol_type = genomic DNA
tgttttacagttaaaaaata

SEQ ID NO: 1788 - DNA, 20 bp, Arachis hypogaea
  source 1..20: mol_type = genomic DNA
acattaagctgtgttttcac

SEQ ID NO: 1789 - DNA, 20 bp, Arachis hypogaea
  source 1..20: mol_type = genomic DNA
ttctgtgtctgcgtttaaat

SEQ ID NO: 1790 - DNA, 20 bp, Arachis hypogaea
  source 1..20: mol_type = genomic DNA
aacgttatactacagttttt

SEQ ID NO: 1791 - DNA, 20 bp, Arachis hypogaea
  source 1..20: mol_type = genomic DNA
tgttacatacaagaaaagca

SEQ ID NO: 1792 - DNA, 20 bp, Arachis hypogaea
  source 1..20: mol_type = genomic DNA
tgaatgtgactatttatttt

SEQ ID NO: 1793 - DNA, 20 bp, Arachis hypogaea
  source 1..20: mol_type = genomic DNA
ttgaatgtgactatttattt

SEQ ID NO: 1794 - DNA, 20 bp, Arachis hypogaea
  source 1..20: mol_type = genomic DNA
aacgatcccttaaatttaat

SEQ ID NO: 1795 - DNA, 20 bp, Arachis hypogaea
  source 1..20: mol_type = genomic DNA
gtgaaaacctattaaattta

SEQ ID NO: 1796 - DNA, 20 bp, Arachis hypogaea
  source 1..20: mol_type = genomic DNA
tgaaaacctattaaatttaa

SEQ ID NO: 1797 - DNA, 20 bp, Arachis hypogaea
  source 1..20: mol_type = genomic DNA
caaattttattattatattt

SEQ ID NO: 1798 - DNA, 20 bp, Arachis hypogaea
  source 1..20: mol_type = genomic DNA
ttttaataatattacttaaa

SEQ ID NO: 1799 - DNA, 20 bp, Arachis hypogaea
  source 1..20: mol_type = genomic DNA
aaaaattgtaaattatttta

SEQ ID NO: 1800 - DNA, 20 bp, Arachis hypogaea
  source 1..20: mol_type = genomic DNA
aaaaaattgtaaattatttt

SEQ ID NO: 1801 - DNA, 20 bp, Arachis hypogaea
  source 1..20: mol_type = genomic DNA
aacatgtgaaaaaagtttcc

SEQ ID NO: 1802 - DNA, 20 bp, Arachis hypogaea
  source 1..20: mol_type = genomic DNA
tgaaaaaagtttcctggtaa

SEQ ID NO: 1803 - DNA, 20 bp, Arachis hypogaea
  source 1..20: mol_type = genomic DNA
tcacttctgtttccattacc

SEQ ID NO: 1804 - DNA, 20 bp, Arachis hypogaea
  source 1..20: mol_type = genomic DNA
aagctaatgataaaatatta

SEQ ID NO: 1805 - DNA, 20 bp, Arachis hypogaea
  source 1..20: mol_type = genomic DNA
aaaatattaaggtacagttt

SEQ ID NO: 1806 - DNA, 20 bp, Arachis hypogaea
  source 1..20: mol_type = genomic DNA
tctaagtgttgttcgcagtg

SEQ ID NO: 1807 - DNA, 20 bp, Arachis hypogaea
  source 1..20: mol_type = genomic DNA
gtgttgttcgcagtgcggtt

SEQ ID NO: 1808 - DNA, 20 bp, Arachis hypogaea
  source 1..20: mol_type = genomic DNA
gttcgcagtgcggtttggat

SEQ ID NO: 1809 - DNA, 20 bp, Arachis hypogaea
  source 1..20: mol_type = genomic DNA
tgtttggatcatatgagttt

SEQ ID NO: 1810 - DNA, 20 bp, Arachis hypogaea
  source 1..20: mol_type = genomic DNA
ccgcaagtaaaattagtgtt

SEQ ID NO: 1811 - DNA, 20 bp, Arachis hypogaea
  source 1..20: mol_type = genomic DNA
ccaaacactaattttacttg

SEQ ID NO: 1812 - DNA, 20 bp, Arachis hypogaea
  source 1..20: mol_type = genomic DNA
acttgcggtgcgatttagat

SEQ ID NO: 1813 - DNA, 20 bp, Arachis hypogaea
  source 1..20: mol_type = genomic DNA
ataatcgatctaatttcaag

SEQ ID NO: 1814 - DNA, 20 bp, Arachis hypogaea
  source 1..20: mol_type = genomic DNA
tcaagcggttttgattagat

SEQ ID NO: 1815 - DNA, 20 bp, Arachis hypogaea
  source 1..20: mol_type = genomic DNA
ttgtattgttatgttatcgt

SEQ ID NO: 1816 - DNA, 20 bp, Arachis hypogaea
  source 1..20: mol_type = genomic DNA
aacaatacaaataaaattat

SEQ ID NO: 1817 - DNA, 20 bp, Arachis hypogaea
  source 1..20: mol_type = genomic DNA
aataattatagcacattaaa

SEQ ID NO: 1818 - DNA, 20 bp, Arachis hypogaea
  source 1..20: mol_type = genomic DNA
ttatagcacattaaacggtt

SEQ ID NO: 1819 - DNA, 20 bp, Arachis hypogaea
  source 1..20: mol_type = genomic DNA
gcacattaaacggtttggat

SEQ ID NO: 1820 - DNA, 20 bp, Arachis hypogaea
  source 1..20: mol_type = genomic DNA
tgctggatcggatcggattt

SEQ ID NO: 1821 - DNA, 20 bp, Arachis hypogaea
  source 1..20: mol_type = genomic DNA
tgtaaactgctggatcggat

SEQ ID NO: 1822 - DNA, 20 bp, Arachis hypogaea
  source 1..20: mol_type = genomic DNA
atttttgtaaactgctggat

SEQ ID NO: 1823 - DNA, 20 bp, Arachis hypogaea
  source 1..20: mol_type = genomic DNA
attctatttttgtaaactgc

SEQ ID NO: 1824 - DNA, 20 bp, Arachis hypogaea
  source 1..20: mol_type = genomic DNA
caatcaaatctaaattagtg

SEQ ID NO: 1825 - DNA, 20 bp, Arachis hypogaea
  source 1..20: mol_type = genomic DNA
gtgcggttttaatcgatttt

SEQ ID NO: 1826 - DNA, 20 bp, Arachis hypogaea
  source 1..20: mol_type = genomic DNA
tgaattgaatgaacaattta

SEQ ID NO: 1827 - DNA, 20 bp, Arachis hypogaea
  source 1..20: mol_type = genomic DNA
gaattgaatgaacaatttaa

SEQ ID NO: 1828 - DNA, 20 bp, Arachis hypogaea
  source 1..20: mol_type = genomic DNA
aattgaatgaacaatttaag

SEQ ID NO: 1829 - DNA, 20 bp, Arachis hypogaea
  source 1..20: mol_type = genomic DNA
tgaatgaacaatttaagggg

SEQ ID NO: 1830 - DNA, 20 bp, Arachis hypogaea
  source 1..20: mol_type = genomic DNA
ggagctagaataaacattag

SEQ ID NO: 1831 - DNA, 20 bp, Arachis hypogaea
  source 1..20: mol_type = genomic DNA
gagctagaataaacattaga

SEQ ID NO: 1832 - DNA, 20 bp, Arachis hypogaea
  source 1..20: mol_type = genomic DNA
agctagaataaacattagag

SEQ ID NO: 1833 - DNA, 20 bp, Arachis hypogaea
  source 1..20: mol_type = genomic DNA
gctagaataaacattagagg

SEQ ID NO: 1834 - DNA, 20 bp, Arachis hypogaea
  source 1..20: mol_type = genomic DNA
ctagaataaacattagaggg

SEQ ID NO: 1835 - DNA, 20 bp, Arachis hypogaea
  source 1..20: mol_type = genomic DNA
aatattaaaataattttttg

SEQ ID NO: 1836 - DNA, 20 bp, Arachis hypogaea
  source 1..20: mol_type = genomic DNA
attaaaataattttttgagg

SEQ ID NO: 1837 - DNA, 20 bp, Arachis hypogaea
  source 1..20: mol_type = genomic DNA
acatgtaaacatttaaaatt

SEQ ID NO: 1838 - DNA, 20 bp, Arachis hypogaea
  source 1..20: mol_type = genomic DNA
catgtaaacatttaaaatta

SEQ ID NO: 1839 - DNA, 20 bp, Arachis hypogaea
  source 1..20: mol_type = genomic DNA
atgtaaacatttaaaattag

SEQ ID NO: 1840 - DNA, 20 bp, Arachis hypogaea
  source 1..20: mol_type = genomic DNA
catactgcgaaagggggcaa

SEQ ID NO: 1841 - DNA, 20 bp, Arachis hypogaea
  source 1..20: mol_type = genomic DNA
gagctacatactgcgaaagg

SEQ ID NO: 1842 - DNA, 20 bp, Arachis hypogaea
  source 1..20: mol_type = genomic DNA
ggagctacatactgcgaaag

SEQ ID NO: 1843 - DNA, 20 bp, Arachis hypogaea
  source 1..20: mol_type = genomic DNA
tggagctacatactgcgaaa

SEQ ID NO: 1844 - DNA, 20 bp, Arachis hypogaea
  source 1..20: mol_type = genomic DNA
gtggagctacatactgcgaa

SEQ ID NO: 1845 - DNA, 20 bp, Arachis hypogaea
  source 1..20: mol_type = genomic DNA
gcagtatgtagctccacctc

SEQ ID NO: 1846 - DNA, 20 bp, Arachis hypogaea
  source 1..20: mol_type = genomic DNA
gttcaaatttaaaccagagg

SEQ ID NO: 1847 - DNA, 20 bp, Arachis hypogaea
  source 1..20: mol_type = genomic DNA
actgttcaaatttaaaccag

SEQ ID NO: 1848 - DNA, 20 bp, Arachis hypogaea
  source 1..20: mol_type = genomic DNA
aacttttaaaacttttcaaa

SEQ ID NO: 1849 - DNA, 20 bp, Arachis hypogaea
  source 1..20: mol_type = genomic DNA
ttatattcttagataatctt

SEQ ID NO: 1850 - DNA, 20 bp, Arachis hypogaea
  source 1..20: mol_type = genomic DNA
acatgttgattgcattgtca

SEQ ID NO: 1851 - DNA, 20 bp, Arachis hypogaea
  source 1..20: mol_type = genomic DNA
gttagagaacgtattactat

SEQ ID NO: 1852 - DNA, 20 bp, Arachis hypogaea
  source 1..20: mol_type = genomic DNA
agttagagaacgtattacta

SEQ ID NO: 1853 - DNA, 20 bp, Arachis hypogaea
  source 1..20: mol_type = genomic DNA
atatttttgagttattaatt

SEQ ID NO: 1854 - DNA, 20 bp, Arachis hypogaea
  source 1..20: mol_type = genomic DNA
tttgcttcgatcttaaacca

SEQ ID NO: 1855 - DNA, 20 bp, Arachis hypogaea
  source 1..20: mol_type = genomic DNA
tcgatcttaaaccatggttt

SEQ ID NO: 1856 - DNA, 20 bp, Arachis hypogaea
  source 1..20: mol_type = genomic DNA
ttcattaccaacctaaacca

SEQ ID NO: 1857 - DNA, 20 bp, Arachis hypogaea
  source 1..20: mol_type = genomic DNA
tcttaaaccatggtttaggt

SEQ ID NO: 1858 - DNA, 20 bp, Arachis hypogaea
  source 1..20: mol_type = genomic DNA
aggttggtaatgaatattcc

SEQ ID NO: 1859 - DNA, 20 bp, Arachis hypogaea
  source 1..20: mol_type = genomic DNA
ggttggtaatgaatattcca

SEQ ID NO: 1860 - DNA, 20 bp, Arachis hypogaea
  source 1..20: mol_type = genomic DNA
aagctcgttcctgtcgtccc

SEQ ID NO: 1861 - DNA, 20 bp, Arachis hypogaea
  source 1..20: mol_type = genomic DNA
atgaatattccagggacgac

SEQ ID NO: 1862 - DNA, 20 bp, Arachis hypogaea
  source 1..20: mol_type = genomic DNA
gggacgacaggaacgagctt

SEQ ID NO: 1863 - DNA, 20 bp, Arachis hypogaea
  source 1..20: mol_type = genomic DNA
cgaaaatttaactaagtgaa

SEQ ID NO: 1864 - DNA, 20 bp, Arachis hypogaea
  source 1..20: mol_type = genomic DNA
aagtgaaaggtaacaaatgc

SEQ ID NO: 1865 - DNA, 20 bp, Arachis hypogaea
  source 1..20: mol_type = genomic DNA
aatgcaggacaagagatagt

SEQ ID NO: 1866 - DNA, 20 bp, Arachis hypogaea
  source 1..20: mol_type = genomic DNA
gtattcctgctattggtctt

SEQ ID NO: 1867 - DNA, 20 bp, Arachis hypogaea
  source 1..20: mol_type = genomic DNA
tgtattcctgctattggtct

SEQ ID NO: 1868 - DNA, 20 bp, Arachis hypogaea
  source 1..20: mol_type = genomic DNA
gaaagcccaagaccaatagc

SEQ ID NO: 1869 - DNA, 20 bp, Arachis hypogaea
  source 1..20: mol_type = genomic DNA
atcctatgtattcctgctat

SEQ ID NO: 1870 - DNA, 20 bp, Arachis hypogaea
  source 1..20: mol_type = genomic DNA
gaccaatagcaggaatacat

SEQ ID NO: 1871 - DNA, 20 bp, Arachis hypogaea
  source 1..20: mol_type = genomic DNA
aatagcaggaatacatagga

SEQ ID NO: 1872 - DNA, 20 bp, Arachis hypogaea
  source 1..20: mol_type = genomic DNA
ttgtgttgtacaaacaaatg

SEQ ID NO: 1873 - DNA, 20 bp, Arachis hypogaea
  source 1..20: mol_type = genomic DNA
tgttgtacaaacaaatgagg

SEQ ID NO: 1874 - DNA, 20 bp, Arachis hypogaea
  source 1..20: mol_type = genomic DNA
agttgttacgccatcttgga

SEQ ID NO: 1875 - DNA, 20 bp, Arachis hypogaea
  source 1..20: mol_type = genomic DNA
aagtgatacaccctccaaga

SEQ ID NO: 1876 - DNA, 20 bp, Arachis hypogaea
  source 1..20: mol_type = genomic DNA
aagttgttacgccatcttgg

SEQ ID NO: 1877 - DNA, 20 bp, Arachis hypogaea
  source 1..20: mol_type = genomic DNA
ttgaagttgttacgccatct

SEQ ID NO: 1878 - DNA, 20 bp, Arachis hypogaea
  source 1..20: mol_type = genomic DNA
ttcgcacaagtctacaatct

SEQ ID NO: 1879 - DNA, 20 bp, Arachis hypogaea
  source 1..20: mol_type = genomic DNA
ttgaagtagagagcagcaac

SEQ ID NO: 1880 - DNA, 20 bp, Arachis hypogaea
  source 1..20: mol_type = genomic DNA
ctctctacttcaattgccag

SEQ ID NO: 1881 - DNA, 20 bp, Arachis hypogaea
  source 1..20: mol_type = genomic DNA
tctctacttcaattgccagc

SEQ ID NO: 1882 - DNA, 20 bp, Arachis hypogaea
  source 1..20: mol_type = genomic DNA
caccccaaccgctctcccgc

SEQ ID NO: 1883 - DNA, 20 bp, Arachis hypogaea
  source 1..20: mol_type = genomic DNA
ttcaattgccagcgggagag

SEQ ID NO: 1884 - DNA, 20 bp, Arachis hypogaea
  source 1..20: mol_type = genomic DNA
attgccagcgggagagcggt

SEQ ID NO: 1885 - DNA, 20 bp, Arachis hypogaea
  source 1..20: mol_type = genomic DNA
ttgccagcgggagagcggtt

SEQ ID NO: 1886 - DNA, 20 bp, Arachis hypogaea
  source 1..20: mol_type = genomic DNA
tgccagcgggagagcggttg

SEQ ID NO: 1887 - DNA, 20 bp, Arachis hypogaea
  source 1..20: mol_type = genomic DNA
cagcgggagagcggttgggg

SEQ ID NO: 1888 - DNA, 20 bp, Arachis hypogaea
  source 1..20: mol_type = genomic DNA
gggagagcggttggggtgga

SEQ ID NO: 1889 - DNA, 20 bp, Arachis hypogaea
  source 1..20: mol_type = genomic DNA
cccatttttgggttgaagga

SEQ ID NO: 1890 - DNA, 20 bp, Arachis hypogaea
  source 1..20: mol_type = genomic DNA
taagcccatttttgggttga

SEQ ID NO: 1891 - DNA, 20 bp, Arachis hypogaea
  source 1..20: mol_type = genomic DNA
tccttccttcaacccaaaaa

SEQ ID NO: 1892 - DNA, 20 bp, Arachis hypogaea
  source 1..20: mol_type = genomic DNA
ccttccttcaacccaaaaat

SEQ ID NO: 1893 - DNA, 20 bp, Arachis hypogaea
  source 1..20: mol_type = genomic DNA
gtgggcctaagcccattttt

SEQ ID NO: 1894 - DNA, 20 bp, Arachis hypogaea
  source 1..20: mol_type = genomic DNA
ggtgggcctaagcccatttt

SEQ ID NO: 1895 - DNA, 20 bp, Arachis hypogaea
  source 1..20: mol_type = genomic DNA
ttcaacccaaaaatgggctt

SEQ ID NO: 1896 - DNA, 20 bp, Arachis hypogaea
  source 1..20: mol_type = genomic DNA
cattttggtaaattaagggt

SEQ ID NO: 1897 - DNA, 20 bp, Arachis hypogaea
  source 1..20: mol_type = genomic DNA
ccattttggtaaattaaggg

SEQ ID NO: 1898 - DNA, 20 bp, Arachis hypogaea
  source 1..20: mol_type = genomic DNA
agcccattttggtaaattaa

SEQ ID NO: 1899 - DNA, 20 bp, Arachis hypogaea
  source 1..20: mol_type = genomic DNA
aagcccattttggtaaatta

SEQ ID NO: 1900 - DNA, 20 bp, Arachis hypogaea
  source 1..20: mol_type = genomic DNA
ccacccttaatttaccaaaa

SEQ ID NO: 1901 - DNA, 20 bp, Arachis hypogaea
  source 1..20: mol_type = genomic DNA
cacccttaatttaccaaaat

SEQ ID NO: 1902 - DNA, 20 bp, Arachis hypogaea
  source 1..20: mol_type = genomic DNA
tgaattaaaaaagcccattt

SEQ ID NO: 1903 - DNA, 20 bp, Arachis hypogaea
  source 1..20: mol_type = genomic DNA
caaattttggtgatgggttt

SEQ ID NO: 1904 - DNA, 20 bp, Arachis hypogaea
  source 1..20: mol_type = genomic DNA
agaggtcaaattttggtgat

SEQ ID NO: 1905 - DNA, 20 bp, Arachis hypogaea
  source 1..20: mol_type = genomic DNA
tagaggtcaaattttggtga

SEQ ID NO: 1906 - DNA, 20 bp, Arachis hypogaea
  source 1..20: mol_type = genomic DNA
gaaggatagaggtcaaattt

SEQ ID NO: 1907 - DNA, 20 bp, Arachis hypogaea
  source 1..20: mol_type = genomic DNA
ttatttttgttgaaggatag

SEQ ID NO: 1908 - DNA, 20 bp, Arachis hypogaea
  source 1..20: mol_type = genomic DNA
agtttttttatttttgttga

SEQ ID NO: 1909 - DNA, 20 bp, Arachis hypogaea
  source 1..20: mol_type = genomic DNA
atagttttgggtcataacaa

SEQ ID NO: 1910 - DNA, 20 bp, Arachis hypogaea
  source 1..20: mol_type = genomic DNA
tattattattatatagtttt

SEQ ID NO: 1911 - DNA, 20 bp, Arachis hypogaea
  source 1..20: mol_type = genomic DNA
gtattattattatatagttt

SEQ ID NO: 1912 - DNA, 20 bp, Arachis hypogaea
  source 1..20: mol_type = genomic DNA
atataataataatactcaaa

SEQ ID NO: 1913 - DNA, 20 bp, Arachis hypogaea
  source 1..20: mol_type = genomic DNA
tataataataatactcaaaa

SEQ ID NO: 1914 - DNA, 20 bp, Arachis hypogaea
  source 1..20: mol_type = genomic DNA
actagttattgaattaaaca

SEQ ID NO: 1915 - DNA, 20 bp, Arachis hypogaea
  source 1..20: mol_type = genomic DNA
gtgctgctgccattgatcaa

SEQ ID NO: 1916 - DNA, 20 bp, Arachis hypogaea
  source 1..20: mol_type = genomic DNA
ggtgctgctgccattgatca

SEQ ID NO: 1917 - DNA, 20 bp, Arachis hypogaea
  source 1..20: mol_type = genomic DNA
ctgatgaagcccttgatcaa

SEQ ID NO: 1918 - DNA, 20 bp, Arachis hypogaea
  source 1..20: mol_type = genomic DNA
ggtacagctcctagtgaggc

SEQ ID NO: 1919 - DNA, 20 bp, Arachis hypogaea
  source 1..20: mol_type = genomic DNA
gcagcagcacctgcctcact

SEQ ID NO: 1920 - DNA, 20 bp, Arachis hypogaea
  source 1..20: mol_type = genomic DNA
cctaggtacagctcctagtg

SEQ ID NO: 1921 - DNA, 20 bp, Arachis hypogaea
  source 1..20: mol_type = genomic DNA
cctcactaggagctgtacct

SEQ ID NO: 1922 - DNA, 20 bp, Arachis hypogaea
  source 1..20: mol_type = genomic DNA
ctcatcgagaatttgaacct

SEQ ID NO: 1923 - DNA, 20 bp, Arachis hypogaea
  source 1..20: mol_type = genomic DNA
tacactattactactaatat

SEQ ID NO: 1924 - DNA, 20 bp, Arachis hypogaea
  source 1..20: mol_type = genomic DNA
atacactattactactaata

SEQ ID NO: 1925 - DNA, 20 bp, Arachis hypogaea
  source 1..20: mol_type = genomic DNA
ctgccttgttttttattttt

SEQ ID NO: 1926 - DNA, 20 bp, Arachis hypogaea
  source 1..20: mol_type = genomic DNA
gaaccaaaaaataaaaaaca

SEQ ID NO: 1927 - DNA, 20 bp, Arachis hypogaea
  source 1..20: mol_type = genomic DNA
ctgtatcttatattttttta

SEQ ID NO: 1928 - DNA, 3287 bp, Arachis hypogaea
  source 1..3287: mol_type = genomic DNA
atggaccctcttactcttggaaggttgttaggggatgttgttgatccctttacaagttctgtatctttgaggattgcgtataacaataactcagaagtagtcaattgttctgacttcaagccctcccaaattaccaaacaaccaagagttgatgttggtggtgatgattttaggactttttacactctggtaagtatctctatatatgcacttcttatctttgaaaagatcatctttattactaattttaagcttacgtggcatgatgatgatatatatgtgtatatatatgtatatgcagattatggtagaccctgatgcacctagtcctactaatcccaatatgagggagtatttgcattggtatgttatgggtcaccatcttataacgtggatgaatatgtaacatatgtgttcctctatacacttctttactgctctaaaagtcgaatatacataaaggttggcttaattatctaaatatcaaatagtttattattatgagaaatattagaggattattagaatttattattttttattattagctagttattaatatttaaaagtataggataaagtatgttattggattattatataaaaaaaattagactaaaaaaattaaattaatagttaaattatgataaaaataataaattctaatgattctctagcatttgtttattattattaaaaaattttaagatatttgtctattagttaaattaaaattaattaatttttttaactaatagacaaatatcctattattgttattattattatttattattattatagctagagagagtaactcaattataagagaataataaatactatctaaagatgagattaactgtgactaattaacatataaggttaagtgtcatacataaaaaattaaataagatataaaaaatatattttactagtaagtatcgtaaaaataattattaaaattagtattagtagaatttttaagttatttcttctttattaaatatattacaaatatattaaaaaaatctaagaaatcaattacataacaagtcaactaagttaacttttttttattttaaaatttgaaaaactaaggtaacaggaagttgtttttattattattattattattattattattattattattattattattattattattattattattattattattattattttgtaataaacctatttttcaactgattagaattggtttcatttctaattaattgtattctttactaaacagcctgcattacttagcatcacaccaaactaattatttgaactttgaagtgatgccaattaacatatctatatatagatcagataccataccctaacgtgtccgtgttccggttcgttttcctttatgttttcggattttgttattgtggtgaacatttaagaaaaactgaaaaagtttaacaaatagagactacaacagagataaaatattacaaaaggtaaatatatatttcaatttttgcacttttaaatttatacggttatgtactctttttctttaatagattttgtcccacaaaattttactaatagaagattttcaacgagccacgagctacgtaagacttattttatttttgttggagtctgcttgtcggttgttttggtatcatttttttttatttctcggttaattagagcatctccaatgagactgattttgaagtttaagttttaaatatgacatatacatgaagtaaaataattttaaattttattttatattaaaataataaatctcatattcaatctcaattactatttatgatatataattttacaaatatcaatataacattttgtagaatttaaaataaaatacatataaaactaaattggaaatgctcttataatccttctgtacgttgaaacttgtatttcaacagctatatatccaaaaaaagatatcataccctaaccaaaaaattattctctgtccaaaagcgtatatgattcatgagatatattaaaacataaaactatatattatataacattatttactactttataaaaataaagatggaagtaaaaaataacagatgaatatataattaacatccagaagcaaaatagtagaaacaatttagagaggtattgattgtgttataaatgatgaggaacaaatgtataaatttgatatctgtgaaagatttatatattgatatatctcttaaatgactgctcaggttggtaattaacattccaggaactacaggggcgagcttcggtaagcacatatatatatacatatatggctcagatcggtaaacagtttaattaattttaaaaaaaatagtttaaataataaatatttatattaaaaataatttataaataaattattttatatttaattttttaatttaaaaaatatttattttaaaagaaatataataaaaaaatttattataaaaaatattttttttcaattttttataaatatttaaataattttttaaaaaattataatttattttaaaaattataccaaacattaatattattactttttataaattaaaaattcaaaaaataatttttaaaatttttgaaacggtctataagatttatgtaaaatgttaaagtacagtataacatattatatttatccatgttatatatatatattaaaattagttattataatataaaatatatataaaaatataaaatatatattaaaataagttaaattataattatatttatatataaatatatattaattaatttaaatagttaattttgatgttcaaataatatttttgtgtgatattatatatgttaagtaagaaaatataatgcagggcaagagataatgaagtatgagagtccagaaccaacggcaggaatacatagaatagtgtttgtgctgtacaagcaaatggtggggaggcaactgatacacgctccgacctggcgtaacaactttaacactcgcgactttgctcaagtttacaatctcggatctcctgttgctgctgtgtacttcaattgccagcgggagagtggttgtggtggaaggagaatgatctagcgtgaaagtgatagtataatactgatctaatagatataggcaaataaattgataagtacttcaatttaatacatatgtatgtgtgtgtttttttgttaagaattagctaaatcttgatataaaagaataattaaataagtgggaagttgtctgctgggctttgttaattcctcctatgtatgcaatgtatgcttcttaa

SEQ ID NO: 1929 - protein, 173 aa, Arachis hypogaea
MDPLTLGRLLGDVVDPFTSSVSLRIAYNNNSEVVNCSDFKPSQITKQPRVDVGGDDFRTFYTLIMVDPDAPSPTNPNMREYLHWLVINIPGTTGASFGQEIMKYESPEPTAGIHRIVFVLYKQMVGRQLIHAPTWRNNFNTRDFAQVYNLGSPVAAVYFNCQRESGCGGRRMI

SEQ ID NO: 1930 - DNA, 20 bp, Arachis hypogaea
  source 1..20: mol_type = genomic DNA
acaaccttccaagagtaaga

SEQ ID NO: 1931 - DNA, 20 bp, Arachis hypogaea
  source 1..20: mol_type = genomic DNA
aacaaccttccaagagtaag

SEQ ID NO: 1932 - DNA, 20 bp, Arachis hypogaea
  source 1..20: mol_type = genomic DNA
tggaccctcttactcttgga

SEQ ID NO: 1933 - DNA, 20 bp, Arachis hypogaea
  source 1..20: mol_type = genomic DNA
cttactcttggaaggttgtt

SEQ ID NO: 1934 - DNA, 20 bp, Arachis hypogaea
  source 1..20: mol_type = genomic DNA
ttactcttggaaggttgtta

SEQ ID NO: 1935 - DNA, 20 bp, Arachis hypogaea
  source 1..20: mol_type = genomic DNA
tactcttggaaggttgttag

SEQ ID NO: 1936 - DNA, 20 bp, Arachis hypogaea
  source 1..20: mol_type = genomic DNA
aaagatacagaacttgtaaa

SEQ ID NO: 1937 - DNA, 20 bp, Arachis hypogaea
  source 1..20: mol_type = genomic DNA
caaagatacagaacttgtaa

SEQ ID NO: 1938 - DNA, 20 bp, Arachis hypogaea
  source 1..20: mol_type = genomic DNA
ttacaagttctgtatctttg

SEQ ID NO: 1939 - DNA, 20 bp, Arachis hypogaea
  source 1..20: mol_type = genomic DNA
ggttgtttggtaatttggga

SEQ ID NO: 1940 - DNA, 20 bp, Arachis hypogaea
  source 1..20: mol_type = genomic DNA
tggttgtttggtaatttggg

SEQ ID NO: 1941 - DNA, 20 bp, Arachis hypogaea
  source 1..20: mol_type = genomic DNA
tcttggttgtttggtaattt

SEQ ID NO: 1942 - DNA, 20 bp, Arachis hypogaea
  source 1..20: mol_type = genomic DNA
ctcttggttgtttggtaatt

SEQ ID NO: 1943 - DNA, 20 bp, Arachis hypogaea
  source 1..20: mol_type = genomic DNA
aacatcaactcttggttgtt

SEQ ID NO: 1944 - DNA, 20 bp, Arachis hypogaea
  source 1..20: mol_type = genomic DNA
tcaccaccaacatcaactct

SEQ ID NO: 1945 - DNA, 20 bp, Arachis hypogaea
  source 1..20: mol_type = genomic DNA
aaacaaccaagagttgatgt

SEQ ID NO: 1946 - DNA, 20 bp, Arachis hypogaea
  source 1..20: mol_type = genomic DNA
caaccaagagttgatgttgg

SEQ ID NO: 1947 - DNA, 20 bp, Arachis hypogaea
  source 1..20: mol_type = genomic DNA
atgttggtggtgatgatttt

SEQ ID NO: 1948 - DNA, 20 bp, Arachis hypogaea
  source 1..20: mol_type = genomic DNA
ttttaggactttttacactc

SEQ ID NO: 1949 - DNA, 20 bp, Arachis hypogaea
  source 1..20: mol_type = genomic DNA
ttactaattttaagcttacg

SEQ ID NO: 1950 - DNA, 20 bp, Arachis hypogaea
  source 1..20: mol_type = genomic DNA
atatatgtatatgcagatta

SEQ ID NO: 1951 - DNA, 20 bp, Arachis hypogaea
  source 1..20: mol_type = genomic DNA
tagtaggactaggtgcatca

SEQ ID NO: 1952 - DNA, 20 bp, Arachis hypogaea
  source 1..20: mol_type = genomic DNA
ttagtaggactaggtgcatc

SEQ ID NO: 1953 - DNA, 20 bp, Arachis hypogaea
  source 1..20: mol_type = genomic DNA
atattgggattagtaggact

SEQ ID NO: 1954 - DNA, 20 bp, Arachis hypogaea
  source 1..20: mol_type = genomic DNA
tccctcatattgggattagt

SEQ ID NO: 1955 - DNA, 20 bp, Arachis hypogaea
  source 1..20: mol_type = genomic DNA
gtcctactaatcccaatatg

SEQ ID NO: 1956 - DNA, 20 bp, Arachis hypogaea
  source 1..20: mol_type = genomic DNA
tgcaaatactccctcatatt

SEQ ID NO: 1957 - DNA, 20 bp, Arachis hypogaea
  source 1..20: mol_type = genomic DNA
tcctactaatcccaatatga

SEQ ID NO: 1958 - DNA, 20 bp, Arachis hypogaea
  source 1..20: mol_type = genomic DNA
atgcaaatactccctcatat

SEQ ID NO: 1959 - DNA, 20 bp, Arachis hypogaea
  source 1..20: mol_type = genomic DNA
atatgagggagtatttgcat

SEQ ID NO: 1960 - DNA, 20 bp, Arachis hypogaea
  source 1..20: mol_type = genomic DNA
gtatttgcattggtatgtta

SEQ ID NO: 1961 - DNA, 20 bp, Arachis hypogaea
  source 1..20: mol_type = genomic DNA
tatttgcattggtatgttat

SEQ ID NO: 1962 - DNA, 20 bp, Arachis hypogaea
  source 1..20: mol_type = genomic DNA
tattcatccacgttataaga

SEQ ID NO: 1963 - DNA, 20 bp, Arachis hypogaea
  source 1..20: mol_type = genomic DNA
tgggtcaccatcttataacg

SEQ ID NO: 1964 - DNA, 20 bp, Arachis hypogaea
  source 1..20: mol_type = genomic DNA
agcagtaaagaagtgtatag

SEQ ID NO: 1965 - DNA, 20 bp, Arachis hypogaea
  source 1..20: mol_type = genomic DNA
taaaagtcgaatatacataa

SEQ ID NO: 1966 - DNA, 20 bp, Arachis hypogaea
  source 1..20: mol_type = genomic DNA
agtcgaatatacataaaggt

SEQ ID NO: 1967 - DNA, 20 bp, Arachis hypogaea
  source 1..20: mol_type = genomic DNA
attattatgagaaatattag

SEQ ID NO: 1968 - DNA, 20 bp, Arachis hypogaea
  source 1..20: mol_type = genomic DNA
ttattaatatttaaaagtat

SEQ ID NO: 1969 - DNA, 20 bp, Arachis hypogaea
  source 1..20: mol_type = genomic DNA
tataggataaagtatgttat

SEQ ID NO: 1970 - DNA, 20 bp, Arachis hypogaea
  source 1..20: mol_type = genomic DNA
ataataataataacaataat

SEQ ID NO: 1971 - DNA, 20 bp, Arachis hypogaea
  source 1..20: mol_type = genomic DNA
ctgtgactaattaacatata

SEQ ID NO: 1972 - DNA, 20 bp, Arachis hypogaea
  source 1..20: mol_type = genomic DNA
ttttaaaatttgaaaaacta

SEQ ID NO: 1973 - DNA, 20 bp, Arachis hypogaea
  source 1..20: mol_type = genomic DNA
atttgaaaaactaaggtaac

SEQ ID NO: 1974 - DNA, 20 bp, Arachis hypogaea
  source 1..20: mol_type = genomic DNA
attctaatcagttgaaaaat

SEQ ID NO: 1975 - DNA, 20 bp, Arachis hypogaea
  source 1..20: mol_type = genomic DNA
atttttcaactgattagaat

SEQ ID NO: 1976 - DNA, 20 bp, Arachis hypogaea
  source 1..20: mol_type = genomic DNA
ggtgtgatgctaagtaatgc

SEQ ID NO: 1977 - DNA, 20 bp, Arachis hypogaea
  source 1..20: mol_type = genomic DNA
caaagttcaaataattagtt

SEQ ID NO: 1978 - DNA, 20 bp, Arachis hypogaea
  source 1..20: mol_type = genomic DNA
ctatatatagatatgttaat

SEQ ID NO: 1979 - DNA, 20 bp, Arachis hypogaea
  source 1..20: mol_type = genomic DNA
aacacggacacgttagggta

SEQ ID NO: 1980 - DNA, 20 bp, Arachis hypogaea
  source 1..20: mol_type = genomic DNA
accggaacacggacacgtta

SEQ ID NO: 1981 - DNA, 20 bp, Arachis hypogaea
  source 1..20: mol_type = genomic DNA
aaccggaacacggacacgtt

SEQ ID NO: 1982 - DNA, 20 bp, Arachis hypogaea
  source 1..20: mol_type = genomic DNA
accctaacgtgtccgtgttc

SEQ ID NO: 1983 - DNA, 20 bp, Arachis hypogaea
  source 1..20: mol_type = genomic DNA
aaggaaaacgaaccggaaca

SEQ ID NO: 1984 - DNA, 20 bp, Arachis hypogaea
  source 1..20: mol_type = genomic DNA
aaacataaaggaaaacgaac

SEQ ID NO: 1985 - DNA, 20 bp, Arachis hypogaea
  source 1..20: mol_type = genomic DNA
aacaaaatccgaaaacataa

SEQ ID NO: 1986 - DNA, 20 bp, Arachis hypogaea
  source 1..20: mol_type = genomic DNA
ttcgttttcctttatgtttt

SEQ ID NO: 1987 - DNA, 20 bp, Arachis hypogaea
  source 1..20: mol_type = genomic DNA
gttttcggattttgttattg

SEQ ID NO: 1988 - DNA, 20 bp, Arachis hypogaea
  source 1..20: mol_type = genomic DNA
cagagataaaatattacaaa

SEQ ID NO: 1989 - DNA, 20 bp, Arachis hypogaea
  source 1..20: mol_type = genomic DNA
tttgcacttttaaatttata

SEQ ID NO: 1990 - DNA, 20 bp, Arachis hypogaea
  source 1..20: mol_type = genomic DNA
ttctattagtaaaattttgt

SEQ ID NO: 1991 - DNA, 20 bp, Arachis hypogaea
  source 1..20: mol_type = genomic DNA
cttctattagtaaaattttg

SEQ ID NO: 1992 - DNA, 20 bp, Arachis hypogaea
  source 1..20: mol_type = genomic DNA
aataagtcttacgtagctcg

SEQ ID NO: 1993 - DNA, 20 bp, Arachis hypogaea
  source 1..20: mol_type = genomic DNA
aagacttattttatttttgt

SEQ ID NO: 1994 - DNA, 20 bp, Arachis hypogaea
  source 1..20: mol_type = genomic DNA
ttttgttggagtctgcttgt

SEQ ID NO: 1995 - DNA, 20 bp, Arachis hypogaea
  source 1..20: mol_type = genomic DNA
agtctgcttgtcggttgttt

SEQ ID NO: 1996 - DNA, 20 bp, Arachis hypogaea
  source 1..20: mol_type = genomic DNA
tatcatttttttttatttct

SEQ ID NO: 1997 - DNA, 20 bp, Arachis hypogaea
  source 1..20: mol_type = genomic DNA
aacttcaaaatcagtctcat

SEQ ID NO: 1998 - DNA, 20 bp, Arachis hypogaea
  source 1..20: mol_type = genomic DNA
aaatacatataaaactaaat

SEQ ID NO: 1999 - DNA, 20 bp, Arachis hypogaea
  source 1..20: mol_type = genomic DNA
tacaagtttcaacgtacaga

SEQ ID NO: 2000 - DNA, 20 bp, Arachis hypogaea
  source 1..20: mol_type = genomic DNA
tagggtatgatatctttttt

SEQ ID NO: 2001 - DNA, 20 bp, Arachis hypogaea
  source 1..20: mol_type = genomic DNA
agagaataattttttggtta

SEQ ID NO: 2002 - DNA, 20 bp, Arachis hypogaea
  source 1..20: mol_type = genomic DNA
cagagaataattttttggtt

SEQ ID NO: 2003 - DNA, 20 bp, Arachis hypogaea
  source 1..20: mol_type = genomic DNA
ttggacagagaataattttt

SEQ ID NO: 2004 - DNA, 20 bp, Arachis hypogaea
  source 1..20: mol_type = genomic DNA
tcatgaatcatatacgcttt

SEQ ID NO: 2005 - DNA, 20 bp, Arachis hypogaea
  source 1..20: mol_type = genomic DNA
ctactttataaaaataaaga

SEQ ID NO: 2006 - DNA, 20 bp, Arachis hypogaea
  source 1..20: mol_type = genomic DNA
tgtttctactattttgcttc

SEQ ID NO: 2007 - DNA, 20 bp, Arachis hypogaea
  source 1..20: mol_type = genomic DNA
atagtagaaacaatttagag

SEQ ID NO: 2008 - DNA, 20 bp, Arachis hypogaea
  source 1..20: mol_type = genomic DNA
tgattgtgttataaatgatg

SEQ ID NO: 2009 - DNA, 20 bp, Arachis hypogaea
  source 1..20: mol_type = genomic DNA
tatctcttaaatgactgctc

SEQ ID NO: 2010 - DNA, 20 bp, Arachis hypogaea
  source 1..20: mol_type = genomic DNA
tcttaaatgactgctcaggt

SEQ ID NO: 2011 - DNA, 20 bp, Arachis hypogaea
  source 1..20: mol_type = genomic DNA
aggttggtaattaacattcc

SEQ ID NO: 2012 - DNA, 20 bp, Arachis hypogaea
  source 1..20: mol_type = genomic DNA
aagctcgcccctgtagttcc

SEQ ID NO: 2013 - DNA, 20 bp, Arachis hypogaea
  source 1..20: mol_type = genomic DNA
attaacattccaggaactac

SEQ ID NO: 2014 - DNA, 20 bp, Arachis hypogaea
  source 1..20: mol_type = genomic DNA
ttaacattccaggaactaca

SEQ ID NO: 2015 - DNA, 20 bp, Arachis hypogaea
  source 1..20: mol_type = genomic DNA
taacattccaggaactacag

SEQ ID NO: 2016 - DNA, 20 bp, Arachis hypogaea
  source 1..20: mol_type = genomic DNA
ggaactacaggggcgagctt

SEQ ID NO: 2017 - DNA, 20 bp, Arachis hypogaea
  source 1..20: mol_type = genomic DNA
cacatatatatatacatata

SEQ ID NO: 2018 - DNA, 20 bp, Arachis hypogaea
  source 1..20: mol_type = genomic DNA
tatacatatatggctcagat

SEQ ID NO: 2019 - DNA, 20 bp, Arachis hypogaea
  source 1..20: mol_type = genomic DNA
aaagtaataatattaatgtt

SEQ ID NO: 2020 - DNA, 20 bp, Arachis hypogaea
  source 1..20: mol_type = genomic DNA
aatttttaaaatttttgaaa

SEQ ID NO: 2021 - DNA, 20 bp, Arachis hypogaea
  source 1..20: mol_type = genomic DNA
tttaatatatatatataaca

SEQ ID NO: 2022 - DNA, 20 bp, Arachis hypogaea
  source 1..20: mol_type = genomic DNA
taagtaagaaaatataatgc

SEQ ID NO: 2023 - DNA, 20 bp, Arachis hypogaea
  source 1..20: mol_type = genomic DNA
aagtaagaaaatataatgca

SEQ ID NO: 2024 - DNA, 20 bp, Arachis hypogaea
  source 1..20: mol_type = genomic DNA
tgtattcctgccgttggttc

SEQ ID NO: 2025 - DNA, 20 bp, Arachis hypogaea
  source 1..20: mol_type = genomic DNA
gtatgagagtccagaaccaa

SEQ ID NO: 2026 - DNA, 20 bp, Arachis hypogaea
  source 1..20: mol_type = genomic DNA
gagagtccagaaccaacggc

SEQ ID NO: 2027 - DNA, 20 bp, Arachis hypogaea
  source 1..20: mol_type = genomic DNA
attctatgtattcctgccgt

SEQ ID NO: 2028 - DNA, 20 bp, Arachis hypogaea
  source 1..20: mol_type = genomic DNA
gtttgtgctgtacaagcaaa

SEQ ID NO: 2029 - DNA, 20 bp, Arachis hypogaea
  source 1..20: mol_type = genomic DNA
tgtgctgtacaagcaaatgg

SEQ ID NO: 2030 - DNA, 20 bp, Arachis hypogaea
  source 1..20: mol_type = genomic DNA
gtgctgtacaagcaaatggt

SEQ ID NO: 2031 - DNA, 20 bp, Arachis hypogaea
  source 1..20: mol_type = genomic DNA
tgctgtacaagcaaatggtg

SEQ ID NO: 2032 - DNA, 20 bp, Arachis hypogaea
  source 1..20: mol_type = genomic DNA
tgtacaagcaaatggtgggg

SEQ ID NO: 2033 - DNA, 20 bp, Arachis hypogaea
  source 1..20: mol_type = genomic DNA
aactgatacacgctccgacc

SEQ ID NO: 2034 - DNA, 20 bp, Arachis hypogaea
  source 1..20: mol_type = genomic DNA
ttaaagttgttacgccaggt

SEQ ID NO: 2035 - DNA, 20 bp, Arachis hypogaea
  source 1..20: mol_type = genomic DNA
agtgttaaagttgttacgcc

SEQ ID NO: 2036 - DNA, 20 bp, Arachis hypogaea
  source 1..20: mol_type = genomic DNA
tttgctcaagtttacaatct

SEQ ID NO: 2037 - DNA, 20 bp, Arachis hypogaea
  source 1..20: mol_type = genomic DNA
ttgaagtacacagcagcaac

SEQ ID NO: 2038 - DNA, 20 bp, Arachis hypogaea
  source 1..20: mol_type = genomic DNA
ctgtgtacttcaattgccag

SEQ ID NO: 2039 - DNA, 20 bp, Arachis hypogaea
  source 1..20: mol_type = genomic DNA
tgtgtacttcaattgccagc

SEQ ID NO: 2040 - DNA, 20 bp, Arachis hypogaea
  source 1..20: mol_type = genomic DNA
caccacaaccactctcccgc

SEQ ID NO: 2041 - DNA, 20 bp, Arachis hypogaea
  source 1..20: mol_type = genomic DNA
ttcaattgccagcgggagag

SEQ ID NO: 2042 - DNA, 20 bp, Arachis hypogaea
  source 1..20: mol_type = genomic DNA
tgccagcgggagagtggttg

SEQ ID NO: 2043 - DNA, 20 bp, Arachis hypogaea
  source 1..20: mol_type = genomic DNA
cagcgggagagtggttgtgg

SEQ ID NO: 2044 - DNA, 20 bp, Arachis hypogaea
  source 1..20: mol_type = genomic DNA
gggagagtggttgtggtgga

SEQ ID NO: 2045 - DNA, 20 bp, Arachis hypogaea
  source 1..20: mol_type = genomic DNA
aatactgatctaatagatat

SEQ ID NO: 2046 - DNA, 20 bp, Arachis hypogaea
  source 1..20: mol_type = genomic DNA
taaaagaataattaaataag

SEQ ID NO: 2047 - DNA, 20 bp, Arachis hypogaea
  source 1..20: mol_type = genomic DNA
aaaagaataattaaataagt

SEQ ID NO: 2048 - DNA, 20 bp, Arachis hypogaea
  source 1..20: mol_type = genomic DNA
ataagtgggaagttgtctgc

SEQ ID NO: 2049 - DNA, 20 bp, Arachis hypogaea
  source 1..20: mol_type = genomic DNA
taagtgggaagttgtctgct

SEQ ID NO: 2050 - DNA, 20 bp, Arachis hypogaea
  source 1..20: mol_type = genomic DNA
gcatacattgcatacatagg

SEQ ID NO: 2051 - DNA, 20 bp, Arachis hypogaea
  source 1..20: mol_type = genomic DNA
gaagcatacattgcatacat
